(19) United States
(12) Patent Application Publication
(10) Pub. No.: US 2011/0190163 A1
(43) Pub. Date: Aug. 4, 2011

(54) Genome-Wide Construction of Schizosaccharomyces Pombe Heterozygous Deletion Mutants Containing Gene-Specific Barcodes by the Methods of 4-Round Serial or Block PCR, or Total Gene Synthesis Thereof

(75) Inventors: Kwang Lae Hoe, Daejeon (KR); Dong Uk Kim, Daejeon (KR); Mi Sun Won, Daejeon (KR); Hyang Sook Yoo, Daejeon (KR); Dong Sup Kim, Daejeon (KR); Han Oh Park, Daejeon (KR); Kyung Sook Chung, Daejeon (KR); Young Joo Jang, Seoul (KR); Mi Young Nam, Daejeon (KR); Sang Jo Han, Daejeon (KR); Hin Jung Choi, Daejeon (KR); Seung Tae Baek, Daejeon (KR); Hyong Bai Kim, Seoul (KR); Kyung Sun Heo, Daejeon (KR); Hye Mi Lee, Daejeon (KR); Min Ho Lee, Daejeon (KR); Jo Young Park, Chungcheongnam-do (KR)

(73) Assignee: Korea Research Institute of Bioscience and Biotechnology, Daejeon (KR)

(21) Appl. No.: 12/989,192

(22) PCT Filed: Aug. 27, 2008
(86) PCT No.: PCT/KR08/05031

§ 371 Date: Feb. 17, 2011

(30) Foreign Application Priority Data
Apr. 22, 2008 (KR) 10-2008-0037420

(51) Int. Cl. C40B 30/06; C12N 1/19

(52) U.S. Cl. 506/10; 435/254.2

(57) ABSTRACT

A method comprising transforming Schizosaccharomyces pombe with a deletion cassette, constructed by four-round serial PCR, block PCR or total gene synthesis, containing a homologous recombination site is provided for preparing gene-targeted heterozygous deletion Schizosaccharomyces pombe. Also provided are gene-targeted hetero2ygous deletion Schizosaccharomyces pombe mutants prepared by the method, and a library of gene-targeted heterozygous deletion Schizosaccharomyces pombe mutants. Further, the library is useful in constructing a method and a kit for screening a drug's modes of action.

### TECHNICAL FIELD

[0001] The present invention relates to a method for systemically preparing gene-targeted heterozygous deletion mutant strains of Schizosaccharomyces pombe. More particularly, the present invention relates to a method for the preparation of gene-targeted heterozygous deletion Schizosaccharomyces pombe by transforming Schizosaccharomyces pombe with a deletion cassette, constructed by four-round serial PCR, block PCR or total gene synthesis, containing a homologous recombination site. Also, the present invention relates to gene-targeted heterozygous deletion Schizosaccharomyces pombe mutants prepared by the method, and a library of gene-targeted heterozygous deletion Schizosaccharomyces pombe mutants. Further, the present invention is concerned with a method and a kit for screening drug modes of action over the library.

### BACKGROUND ART

[0002] In 2006, the worldwide drug market was reported to be worth 643 billion dollars and Korean drug products had an 11,472.8 billion won share of the total. The global drug market is expected to increase to 735˜745 billion dollars in 2007. It was reported that an average cost of 100˜600 million dollars is required to bring a new drug to market, with a developmental period of from 10 to 15 years. In spite of such huge expenses of time and money, the success rate of new drug development is reported to be as low as one in ten thousand. It is accordingly necessary for the successful development of new drugs that highly putative “drug's modes of action” which play critical roles in the occurrence or treatment of diseases, from among a number of possible modes of action, should be defined; this is generally achieved through intelligent bioinformatical tools extracting biological relevance from complex experimental data. Thereby, it is very important to systemically screen specific modes of action directly involved in lots of diseases.

[0003] As such, screening technologies are useful in identifying the targets against which drugs exert their therapeutic effects, thus greatly contributing to reducing the time period required for drug development. Also, screening technologies allow the identification of the modes of action which are associated with side effects of the drug. Therefore, there is an imperative need for a novel method for screening a drug's modes of action.

[0004] Schizosaccharomyces pombe, a fission yeast useful in the preferable embodiment of the present invention, does not have an evolutionarily high correlation with the budding yeast Saccharomyces cerevisiae although both belong to ascomycetes. S. pombe (Wood V. et al., Nature. 45:871-880, 2002) marked the sixth model eukaryotic organism whose genome has been fully sequenced since S. cerevisiae (Goffeau A. et al., Science, 274:546-567, 1996). According to the analysis, S. pombe has an effective genomic structure which has the lowest functional repetition of genes among the eukaryotic cells whose genomes have been determined thus far. It was also reported that S. pombe contains 4,824 protein-coding genes, which is the smallest number yet identified for a eukaryote, but some 43% of the genes contain introns. Also, S. pombe is found to have highly conserved genes important for eukaryotic cell organization including those required for cell-cycle control, proteolysis, protein phosphorylation and RNA splicing. Further, 31% of the genes of S. pombe were identified to differ from that of S. cerevisiae and to rather share homology with humans. Thus, the comparison of genetic functions between S. pombe and S. cerevisiae is emerging as an effective methodology to study the functions of human genes.

[0005] The term “gene targeting”, as used herein to transform yeast strains in the screening of a drug's modes of action, is intended to refer to a genetic technique that uses homologous recombination to change an endogenous gene such as by destroying a gene (knock-out) or by introducing a gene. A transgenic mouse which has had a gene implicated in a specific disease removed therefrom or introduced thereinto has its pathology observed, thus allowing the knock-out gene to be functionally identified.

[0006] Since the creation of a transgenic mouse in 1989, gene targeting has made great technical advances. For example, target genes can be introduced at specific developmental stages or into already grown adults. Also, it is possible to design a mutant gene which is expressed at a specific time during development. Martin J. Evans, Oliver Smithies and Mario R. Capecchi were declared laureates of the 2007 Nobel Prize in Physiology and Medicine for their work on gene targeting.

[0007] PCR (polymerase chain reaction) is a molecular biological technique for replicating and amplifying DNA (U.S. Pat. Nos. 4,683,195, 4,683,202, and 4,800,159; European Pat. Nos. 0200362, 0201184 and 0229701; Methods in Enzymology, Volume 155, 1987, pp. 335-350, Murakawa et al., DNA 7; 287-295 (1988)). This technique consists typically of from 30 to 40 cycles of denaturation, annealing and extension, and allows a gene segment of interest to be selectively amplified even from trace amounts in the DNA pools. Now variations on the basic PCR technique have been developed, including multiplex-PCR, nested PCR, quantitative PCR, real-time PCR, reverse transcription (RT-PCR), touchdown PCR, etc.

[0008] Real-time PCR is an established tool for DNA quantification that measures the accumulation of DNA product after each round of PCR amplification, based on the detection of a fluorescent signal produced proportionally during amplification of a PCR product, because a fluorescent probe is used together with primers. Real-time PCR can obtain PCR results rapidly and conveniently because it does not need electrophoretic determination. Also, real-time PCR enjoys the advantage of a low risk of contamination. For these reasons, real-time PCR enjoys widespread use as a substitute for typical PCR.

[0009] Transformation is the genetic alteration of a cell resulting from the uptake, genomic incorporation, and expression of foreign DNA. In practice, the foreign DNA is labeled with a selectable marker to easily select the cells to which the foreign DNA has been successfully introduced. Typical examples of the selectable markers include ampicillin-, tetracycline- and kanamycin-resistance genes. After transformation, culturing in the presence of related antibiotics allows the selection of successfully transformed bacteria. In the present invention, a specific gene is knocked out in the fission yeast by transformation with the introduction of an antibiotic-resistance gene into the corresponding homologous recombination site.

[0010] Gene synthesis is a well-known technique on which about 200 articles have published since the development of oligo-ligation based on PCR in the early 1990s (Edge et al., Nature. 292:756-62, Rouillard et al., NAR. 32:176-80, Smith et al., NAR. 10:4467-82, Dillon et al., Biotechniques. 9:298-300, Ciccarelli et al., Nucleic Acid Research. 21:6007-13, Prodromou et al., Protein Engineering. 5:827-29, Stemmer et al., Gene. 164:49-53, Lin et al., Gene. 288:85-94, Venter et al., Proceedings National Academy of Science. 100:15440-45). In principle, oligonucleotides from 20 bp to 60 bp long are annealed and ligated to each other to give a double-stranded DNA fragment which is then used as a template for the amplification of a desired DNA through PCR. The DNA fragment which can be obtained by gene synthesis is generally shorter than 1,000 bp. For a longer gene, the obtained DNA fragments less than 1000 bp are ligated by PCR. In 2003, Dr. Craig Venter succeeded in building the entire 5,386-bp genome of (ΦX174 bacteriophage (phiX174 bacteriophage) in such a manner.

[0011] With regard to the screening of a drug's mode of action, most widely used are in vitro methods. For example, a mixture of cellular proteins are passed through an affinity column with a drug attached on a resin, and the proteins thus bound to the drug are purified and analyzed by MALDI-TOF (Schreiber et al., Bioorg. Med. Chem. 6:1127-1152). An alternative is to pass a human protein-phage library in which human proteins are expressed on the membrane through an affinity column containing drug-attached resin, followed by selection and analysis of phages bound to the drug to infer the target proteins of the drug (Sche et al., Chem. Biol. 6:707-716).

[0012] Recently, attempts have been made on an in vivo screening method which is quite different from the above two methods (Lum et al Cell. 116:121-37). This method, although disadvantageous in that it screens yeast proteins in contrast to the in vitro methods of screening human proteins, has the advantage of being rapid (100 drugs/week), convenient and having a high success rate. In 2004, Drs. Shoemaker and Lum's research team at Merck screened modes of action against 80 pre-existing drugs with an increase in success rate of from 25% to 70%. The screening strategy, referred to as drug-induced haploinsufficiency, is based on the fact that lowering the gene dosage of a drug target increases the susceptibility to the drug. In most cases, one allele is sufficient to permit the cell to function normally, but when the normal phenotype requires the protein product of both alleles, and restitution of 50% of the gene function results in an abnormal phenotype, this is referred to as haploinsufficiency. It was reported that 180 genes, corresponding to 3% of about 6,000 genes, of budding yeast, were implicated in haploinsufficiency such that the mutants grew poorly even in sufficient nutrient media compared to the wild-type (Deutschbauer et al., Genetics. 169:1915-25). This haploinsufficiency is a basis for screening a drug's modes of action in heterozygous mutant yeast strains. For example, assuming that a drug ‘a’ targets a protein ‘A’, treatment with the drug ‘a’ at a dose of IC₅₀, a concentration to inhibit the protein ‘A’ by half; leads to 100% inhibition (knock-down) of the protein ‘A’ in the gene-targeted heterozygous strain. Accordingly, the drug-treated strain grows at a lower rate than does the non-treated strain. In accordance with the present invention, a method for screening a drug's modes of action on the basis of haploinsufficiency is provided.

[0013] Success in constructing gene targeted strains is dependent on the properties of the strains because it is determined by homologous recombination efficiency which differs from one strain to another. However, the homologous recombination efficiency in the same strain is proportional to the length of genomic homologous sites. Thus, a longer DNA fragment corresponding to a genomic homologous site permits the construction of a gene-targeted strain at a more efficient rate. The trials summarized in Table 1 below have been performed on budding yeast, but there are no precedents on fission yeast at such a high success rate (Palaniyandi et al., Nucl Acid Res. 3:2799-2800; Michael et al., Gene. 158:113-17; Kaur et al., Nucl Acid Res. 25:1080-81).

TABLE 1

| | | | Homologous | Success |
|---|---|---|---|---|
| Construction of Deletion Cassettes | | Yeasts | Length (bp) | rate(%) |
| PCR with gene- | Serial PCR | Budding | 45~60 | 81 |
| specific Oligo | Single Oligo | Budding | 38~50 | 10 |
| | Single Oligo | Fission | 40 | 1~3 |

[0014] Typically, a gene specific linker-mediated PCR method has been used to lengthen homologous recombination sites for use in the construction of gene-targeted fission yeast strains. Using this method, Giaever et al. constructed about 6000 deletion cassettes of the total genome of the budding yeast such that each cassette was flanked by two 40-60 bp homologous regions of yeast DNA sequence (Giaever et al., Nature Genetics 14:450-56; Wach et al., Yeast 10:1793-1808). In the case of the budding yeast, 45˜60 bp genomic homologous regions at both termini of each cassette guaranteed a success rate of as high as 81% in the genome-wide construction of mutant strains (Table 1). In fission yeast however, even when the homologous length is extended to 40 bp, the success rate is increased to at most 1˜3%. Such a low success rate for the fission yeast indicates that strain preparation is very difficult due to the inferiority of the fission yeast in homologous recombination rate to that of the budding yeast. In full consideration of this background, the present invention provides a method for constructing fission yeast mutants at high efficiency through homologous recombination.

### DISCLOSURE

### Technical Problem

[0015] Reportedly, it is technically more difficult to construct gene-targeted mutants from fission yeasts than from budding yeasts (Decottignies et al., Genome Research. 13:399-406). In the present invention, a deletion cassette is constructed by flanking a selectable marker gene with a pair of 20-mer gene-specific barcodes and assigning a pair of homologous recombination regions 250˜350 bp in length to the sides of respective barcodes, and is transformed into the fission yeast to make gene-targeted heterozygous deletion mutants of the fission yeast. Based on a library of the heterozygous deletion mutants, a Genechip allows the high throughput screening of a drug's modes of action.

### Technical Solution

[0016] It is therefore an object of the present invention to provide a method for preparing a gene-targeted, heterozygous deletion mutant strain of Schizosaccharomyces pombe, using a gene targeting deletion cassette comprising a selectable marker gene, barcode base sequences for microarrays, and homologous recombination regions.

[0017] It is another object of the present invention to provide a gene-targeted, heterozygous deletion mutant strain of Schizosaccharomyces pombe, prepared using the method.

[0018] It is a further object of the present invention to provide a library of gene-targeted, heterozygous deletion mutant strains of Schizosaccharomyces pombe, prepared using the method.

[0019] It is still a further object of the present invention to provide a method of screening a drug's modes of action on the basis of the library of gene-targeted, heterozygous deletion mutant strain of Schizosaccharomyces pombe.

[0020] It is still another object of the present invention to provide a kit for screening novel drugs, comprising the library of gene-targeted, heterozygous deletion mutant strain of Schizosaccharomyces pombe.

### Advantageous Effects

[0021] A system of preparing gene-targeted, heterozygous deletion mutants of Schizosaccharomyces pombe was first established in the world by the present inventors. Also, the present invention increased a success rate in constructing a strain of fission yeast, which is generally recognized as being lower than that for budding yeast, to 95%˜99%, which is similar to the success rate for budding yeast. Out of approximately 6,000 genes of Saccharomyces cerevisiae, only 5,700 genes (95%) were successfully used in constructing heterozygous deletion mutants of the budding yeast (refer to “Saccharomyces Genome Deletion Project” disclosed in the Website http://www-sequence.stanford.edu/group/yeast_deletion_project/not_made.html).

[0022] In the present invention, 4,945 gene-targeted, heterozygous deletion mutants of Schizosaccharomyces pombe, which corresponds to 99% of the approximately 5,000 genes (4,989˜5,014 genes estimated) obtained, on Jun. 20, 2007, from the public fission yeast database at the Well come Trust Sanger Institute (http://www.genedb.org/genedb/pombe/index.jsp) were successfully constructed.

[0023] The 55 genes excluded from the construction, which corresponds to 1% of the total genes and consists of 18 wtf genes, 11 Tf2 genes and 26 dubious genes, are theoretically impossible to use in constructing gene-targeted deletion mutants. A library of the heterozygous mutant strains prepared according to the present invention can be also applied to the system of screening a drug's modes of action on a gene level, thus effectively developing novel drugs.

### DESCRIPTION OF DRAWINGS

[0024] FIG. 1 is a schematic view showing a structure of a typical deletion cassette for gene targeting,

[0025] FIG. 2 shows a process of constructing a Kan^{r}-barcode module for use in a deletion cassette,

[0026] FIG. 3 shows a process of constructing a deletion cassette through four-round serial PCR,

[0027] FIG. 4 shows a process of constructing a deletion cassette through block PCR,

[0028] FIG. 5 shows a process of constructing a deletion cassette through gene synthesis,

[0029] FIG. 6 shows the identification of a desired mutant strain by colony PCR,

[0030] FIGS. 7 to 55 show base sequences of gene-specific barcodes to be inserted into deletion cassettes for the construction of gene-targeted mutant strains

[0031] FIG. 56 schematically shows a process of screening a drug's modes of action using GeneChip on the basis of haploinsufficiency,

[0032] FIG. 57 is a process of preparing a library of gene-targeted mutants for screening a drug's modes of action by use of GeneChip,

[0033] FIG. 58 shows an order-made GeneChip from Affymetrix,

[0034] FIG. 59 shows the measurement of the antifungal agent terbinafine for IC₅₀ applied to the screening of a drug's modes of action on Genechip, and

[0035] FIG. 60 shows the reconfirmation of the Genechip-based terbinafine's modes of action on plates.

### BEST MODE

[0036] In the present invention, four-round serial PCR, block PCR or gene synthesis is employed to amplify deletion cassette modules with which transformed gene-targeted mutants are then constructed. In turn, the mutants are used to construct a library of DNA of which advantage is taken to search for a drug's modes of action.

[0037] In an embodiment of the present invention, provided is a method for constructing gene-targeted heterozygous deletion mutants of fission yeast using a deletion cassette which comprises (a) a selectable marker, (2) a pair of gene-specific barcode base sequences, positioned respectively at both flanks of the selectable marker gene, for a microarray, and (3) a pair of at least 150 bp homologous recombination regions, respectively assigned to sides of the barcode base sequences at positions upstream and downstream of the selectable marker gene. A detailed description will be given of each component, below.

[0038] Selectable Marker

[0039] A selectable marker is used to discriminate successfully transformed yeasts from unsuccessful ones. Examples of the selectable marker useful in the present invention include auxotrophic markers, neomycin resistance (neo^{R}), kanamycin resistance (kan^{R}), hygromycin resistance (hyg), histidinol dehydrogenase (hisD), guanine phosphoribosyltransferase (gpt), tetracycline (tet^{R}), hypoxanthine phosphoribosyltransferase (hprt), ura3, ble and sacB, with preference for kanMX, which is derived from kanamycin resistance gene. The deletion cassette comprising a selectable marker may be integrated into the genome by homologous recombination.

[0040] An autographic marker that requires a specific amino acid or nucleic acid for survival, such as ura4, leu1, his3, is currently used for targeted gene integration and disruption in fission yeasts. However, a strain with one or more auxotrophic mutations is requisite for the use of such a marker. Also, a gene conversion may occur in the auxotroph due to the introduction of DNA. Further, auxototrophic mutation itself; together with other mutations, may result in phenotypes which are difficult even to guess, such as somosensitivity, nitrogen-starvation regulated cellular differentiation, sporulation, pseudohyphae, etc. In addition, many auxotrophic mutations may make it difficult for the yeast to grow in a typical medium.

[0041] In order to overcome these limitations of auxotrophic markers, the Philippsen group developed the KanMX module as a dominant drug resistance marker. This marker was used for the deletion project of Saccharomyces cerevisiae. Resistant to Geneticin® (G418), the kanMX module was designed to serve as a selectable marker. Over auxotrophic markers, the G418 marker has the advantage of giving a high rate of deletion even upon the use of PCR-DNA fragments. Now, additional dominant drug resistance markers have been developed, including those resistant to hygromycin B, nourseothricin, and bialaphos/phosphinothricin.

[0042] Used in a preferred embodiment of the present invention is the selection maker KanMX4 which is 810 bp in length and contains Kan transposon Tn903 ORF from E. coli. With aminoglycoside phosphotransferase activity, KanMX4 is reported to inhibit kanamycin or its derivative G418 (Lang-Hinrichs et al., Current Genetics. 18:511-6, Oka et al., J. Mol. Biol. 147:217-26). This kanMX module, one of the dominant drug resistance markers, contains the known kan^{r} open reading-frame (ORF) of the E coli transposon Tn903 fused to transcriptional and translational control sequences of the TEF gene of the filamentous fungus Ashbya gossypii. This heterogonous module permits efficient selection of transformants resistant against geneticin (G418).

[0043] A high false rate of integration to the target region may generally occur if PCR products are used, or if a marker has low sequence homology to the target region. In contrast, the KanMX module (G418 marker) serving as a heterologous selectable marker guarantees a high rate of deletion thanks to its dominant resistance even if PCR-DNA fragments are used.

[0044] Barcode Sequences for Microarrays

[0045] In order to efficiently measure growth rates of a library of (6,000) gene-targeted fission yeast mutants, a practical and systematic strategy is necessary for the growth measurement through a gene chip technique. In this regard, barcode sequences for microarrays are introduced into the deletion cassettes (FIG. 3). These barcode sequences make it easy to detect the strains whose growth is inhibited by a drug in such a manner that a chromosome pool isolated from 6,000 strains is used as a template for PCR amplification of barcodes regions, followed by analysis on a gene chip. The barcode sequences must be specifically designated to each strain, thus requiring a population two or more times greater than that of the genomic 1 DNAs of the strains (each one assigned upstream and downstream of genomic DNA, one genomic DNA flanked by at least two barcode sequences). As long as it satisfies this condition, there is no limitation imparted to the length of the barcode sequences.

[0046] In a preferred embodiment of the present invention, the KanMX4 of the deletion cassette is flanked by two copies of a 20-mer gene-specific barcode. The theoretically possible number of 20-mer barcodes is 4²⁰ because the four bases G, A, T and C are used in the barcode sequences. Barcode sequences used in the present invention are those shown in FIGS. 7 to 55.

[0047] Homologous Recombination Regions

[0048] A success rate in constructing gene-targeted strains is dependent on properties of strains because it is determined by homologous recombination efficiency which differs from one strain to another. However, the homologous recombination efficiency in the same strain is highly proportional to the length of genomic homologous regions (Michael et al., Gene. 158:113-17; Palaniyandi et al., Nucl Acid Res. 3:2799-2800). Thus, the DNA fragments corresponding to genomic homologous regions must have their lengths optimized in order to construct gene-targeted strains with efficiency.

[0049] According to an embodiment of the present invention, this homologous recombination region is 150 bp or greater in length and is positioned at each of 5′ and 3′ sides in the deletion cassette. Preferably, the homologous recombination region ranges in length from 150 bp to 450 bp. A more preferable embodiment of the present invention provides a deletion cassette in which the homologous recombination region with a length of from 150 to 450 bp is positioned at each of 5′ and 3′ sides.

TABLE 2

| Construction of Deletion | | | Homologous | Success | |
|---|---|---|---|---|---|
| Cassettes | | Yeasts | Length(bp) | rate(%) | Note |
| PCR with | Serial PCR | Budding | 45~60 | 81 | |
| gene- | Single | Budding | 38~50 | 10 | |
| specific | Oligo | | | | |
| Oligo | Single | Fission | 40 | 1~3 | |
| | Oligo | | | | |
| | 4-Round | Fission | 80 | 50 | Present |
| | Serial PCR | | | | invention |
| | Block PCR | Fission | 350~450 | 80 | |

| | | | |
|---|---|---|---|
| Gene Synthesis | Fission | 150 | 80~98 |

[0050] Construction of Deletion Cassette for Gene Targeting The deletion cassette of the present invention plays an essential role in targeting about ˜5000 yeast genes in such a manner that a marker gene of the deletion cassette transformed into the yeast is substituted for a target gene. As a prerequisite to the construction of gene-targeted, heterozygous fission yeast mutants, the deletion cassette preferably has a gene structure in which the selectable marker is flanked by the gene-specific barcodes which are in turn respectively inserted to chromosome-homologous recombination regions of suitable lengths (FIG. 1).

[0051] In a preferred embodiment of the present invention, the KanMX4 module is designed to express the kanamycin resistant gene of Tn903 in the fission yeast, having the structure in which the resistance gene is preceded by the 381 bp TEF promoter sequence of Ashbya gossypii just before the initiation codon ATG thereof and followed by the 242 bp TEF terminator of Ashbya gossypii just after the stop codon thereof. When used, the promoter or terminator of the budding yeast (Saccharomyces cerevisiae) or the fission yeast itself also acts as an additional chromosome-homologous region, resulting in a false homologous recombination. For this reason, the promoter used in the deletion cassette is preferably from a heterogeneous yeast. The KanMX4 module thus constructed becomes 1,433 bp in length. After the deletion cassette is introduced into the fission yeast through transformation, the marker gene undergoes homologous recombination with a chromosomal target gene, so that the marker gene is inserted into the chromosome while the target gene is deleted.

[0052] In an example of the present invention, a primary PCR was performed in the presence of a pair of 70 bp-long 5′ and 3′ barcode primers, each containing a 20 bp barcode, with the kanamycin resistance gene (Kan^{R}) serving as a template, to afford a Kan^{R}-barcode module (FIG. 2) which was in turn used as a template for secondary PCR with a pair of 60˜80 bp primers, each consisting of a 40˜60 bp chromosome-homologous recombination sequence and a 20 bp-long 5′ or 3′ terminal region of the Kan^{R}-barcode module, to produce a deletion cassette, useful as a component of the present invention.

[0053] Four-Round Serial PCR, Block PCR and Gene Synthesis for Construction of Deletion Cassette

[0054] The construction of the deletion cassette for gene targeting in accordance with the present invention is accomplished by (1) four-round serial PCR; (2) block PCR; or (3) gene synthesis, preferably as follows.

[0055] (1) The term “four-round serial PCR”, as used herein, is intended to refer to PCR which is performed four times in series. A primary PCR is performed with a pair of about 70 bp-long 5′ and 3′ barcode primers to afford a barcode module which is in turn used as a template in three successive PCRs with a pair of 50-mer primers for the first two and with a pair of 40-mer primers for the final one, so as to give a gene-specific barcode and a 80 bp-long gene-homologous recombination region.

[0056] (2) The term “block PCR”, as used herein, is intended to refer to a block PCR which is performed with 5′ and 3′ DNA fragments for homologous recombination on the chromosome, which are separately produced to a length of 350˜500-bp in length by PCR, in admixture with the produced Kan^{r}-barcode module, to afford a deletion cassette.

[0057] (3) The term “gene synthesis” is quite different from PCR and enjoys the following advantages: first, the gene synthesis method can be conducted by one round of phosphorylation and ligation and two rounds of PCR while the four-round PCR is accomplished by four rounds of PCR and four rounds of purification. Thanks to the simplicity thereof, the gene synthesis achieved the genome-wide construction of heterozygous deletion mutants at a success rate of 90% or higher whereas a success rate of 80% was obtained with the block PCR (Table 2); secondly, the gene synthesis can be conducted in series on 96-well plates, thus improving workability. For example, one experienced worker can construct ten strains a week through conventional PCR. In contrast, gene synthesis enables a worker to construct 100 or more strains a week, increasing the efficiency at least 10 times. Finally, only two rounds of PCR are needed whereas the conventional PCR is conducted four times in series, which decreases the possibility of point mutations by two or more times. For instance, 20 strains randomly selected from each group of the mutants constructed according to the methods were subjected to PCR for the amplification of an approximately 2.1-kb target gene, followed by DNA sequencing to find mutations at a rate of 0.2 bases/1 kb, which is two or more times lower than 0.5 bases/1 kb in the conventional PCR.

[0058] FIG. 1 is a gene map illustrating a deletion cassette constructed by gene synthesis according to the present invention. The methods (1) and (2) are common in that deletion cassettes are constructed on the basis of PCR, but the method (3) is different in that the construction of deletion cassettes is based on the ligation of synthetic oligonucleotides, but not on PCR. Particularly, the method (3) permitted successful construction of about 200 heterozygous gene-targeted mutants which are difficult to make by conventional PCR methods, showing a success rate as high as 97% from a total 4,988 genes of the fission yeast.

[0059] In accordance with an aspect thereof, the present invention provides a high-throughput screening system of in vivo drug's modes of action in which a library of the heterozygous deletion mutants of fission yeast is prepared with the deletion cassettes constructed as described above and is applied to order-made gene chips. In a preferred example of the present invention, the performance of the system was demonstrated by use of the antifungal agent terbinafine.

[0060] Heterozygous Fission Yeast

[0061] Among the fission yeast group are Schizosaccharomyces octosporus and Schizosaccharomyces pombe. Any fission yeast may be used in the present invention. The mutant strains transformed with the deletion cassettes are heterozygous deletion mutants in which the gene-specific sequences of the deletion cassettes are exchanged with the chromosomal target genes of the fission yeast by homologous recombination to delete the target genes from the chromosome of the fission yeast.

[0062] In a preferable embodiment, the fission yeast may be Schizosaccharomyces pombe, but is not limited thereto. The fission yeast Schizosaccharomyces pombe, useful in a preferable embodiment of the present invention, was first isolated from African millet beer and is widely used as a model eukaryote for cell and molecular studies as well as in the production of foods such as beer, breads, etc. S. pombe is particularly useful in investigating the cell cycle of cells which proliferate through equal division. Introns are distributed among 43% of S. pombe genes, showing the feature of higher eukaryotic organisms. Found to have a compact genomic structure with about 5,000 ORFs (open reading frames), the fission yeast is in addition used as a material suitable for gene analysis. Further, S. pombe is recognized for making broad contributions to the life sciences, particularly with applications involved with the development of new drugs.

[0063] In accordance with a further aspect thereof, the present invention pertains to a gene-targeted, heterozygous deletion mutant of fission yeast which is prepared with a gene-target deletion cassette comprising a selectable marker gene, barcode gene sequences for microarray analysis, and homologous recombination regions.

[0064] In accordance with still a further aspect thereof; the present invention pertains to a library of gene-targeted heterozygous fission yeast mutants prepared by the method of the present invention.

[0065] In accordance with still another aspect thereof the present invention pertains to a method for screening a drug's modes of action by chemically treating a library of heterozygous fission yeast mutants, culturing the chemically treated library, isolating total genomic DNA from the culture, and applying the isolated genomic DNA to microarray GeneChip or to real-time PCR.

[0066] As a tool for identifying a drug's modes of action, a library of heterozygous fission yeast mutants is provided. To identify “a drug's mode of action” is essential to the improvement of preexisting drugs in medicinal efficiency and the development of a new drug free of or with few side effects. The method for screening a drug's mode of action in accordance with the present invention comprises the steps of

[0067] 1) treating a library of heterozygous fission yeast mutants with a chemical;

[0068] 2) culturing the library of the chemically treated, heterozygous fission yeast mutants;

[0069] 3) isolating genomic DNA from the cultured library; and

[0070] 4) measuring and analyzing growth rates of the mutants with the isolated genomic DNA applied on microarray gene chips to detect strains which are relatively inhibited from growing.

[0071] As long as it inhibits the growth of the mutants, any chemical may be used in the present invention. In a preferred example of the present invention the antifungal agent terbinafine, which targets the gene erg1, was used to examine whether the screening system of a drug's modes of action worked well or not.

[0072] As long as it is known in the art, any technique may be used to isolate genomic DNA from the fission yeast. In a preferred example of the present invention, the fungal/bacterial DNA kit (Zymo Research, catalog #D6005) was employed to obtain genomic DNA.

[0073] The term “gene chip” or “GeneChip”, as used herein, refers to a tool for analyzing the expression of genetic information, which is typically composed of an arrayed series of hundreds to tens of thousands of microscopic spots of DNA oligonucleotides on a solid support of about 1 cm². The DNA oligonucleotides of known, specific genetic information are arranged on the surface of the chip and are used as probes to hybridize a target under high-stringency conditions. Probe-target hybridization is usually detected and quantified by fluorescence-based detection of fluorophore-labeled targets to determine a relative abundance of nucleic acid sequences in the target. These gene chips are not only useful for gene studies, but also can detect gene-related diseases quickly. Further, these new analysis systems find a wide spectrum of applications in, for example, selecting or designing optimal customized drugs.

[0074] As long as it recognizes the gene-specific barcode sequence inserted to the deletion cassette, any gene chip may be used in the present invention. A preferable embodiment of the present invention employed deletion cassettes with 20-mer barcodes inserted thereinto, and an order-made GeneChip with a serial number of KRIBBSP1-a520429 from Affymetrix to detect the barcodes.

[0075] In an alternative embodiment of the present invention, real-time PCR, instead of GeneChip, was performed with inter-chelating dye or flourophore-labeled probe to screen a drug's modes of action. A detailed description will be given of detection with probes, below.

[0076] TaqMan probes and cycling probes have been developed for use as fluorescent probes in real-time PCR. The former is a technology utilizing the 5′→3′ exonuclease activity of the Taq DNA polymerase for measuring the amount of target sequences in the samples while the cycling probe technology is a method utilizing a combination of chimera probe, composed of RNA and DNA, and RNase H. In this method, one end of the probe is labeled with a fluorescent substance and the other end is labeled with a quencher, which quenches the fluorescence emitted from the fluorescent substance. When this probe forms a hybrid with the complementary sequence of amplified product, RNase H specifically cuts the RNA region of this probe, resulting in emissions of strong fluorescence. Below, a detailed description will be given of the TaqMan probe technology for screening a drug's modes of action.

[0077] In a preferable embodiment of the present invention, real-time PCR is conducted with a Taqman probe in addition to common primers. A Taqman probe is an oligonucleotide which is labeled with a reporter fluorophore at the 5′ end and with a quencher at the 3′ end. During PCR, the probe anneals specifically between the forward and reverse primers to an internal region of the PCR product at the annealing step, with the fluorescence quenched by the quencher. While the polymerase then carries out the extension of the primers and replicates the template to which the TaqMar™ probe is bound, the 5′ exonuclease activity of the polymerase cleaves the probe, releasing the reporter molecule away from the close vicinity of the quencher. As a result, the fluorescence intensity of the reporter dye increases and can be detected to determine the expression of the target gene. In the present invention, a Taqman™ probe may be constructed to have a barcode sequence as the oligonucleotide sequence. In this case, real-time PCR with each Taqman probe gives quantitative data on the real time expression of corresponding barcodes, on the basis of which significantly increased or decreased regions can be regarded as a drug's modes of action.

[0078] In accordance with still another aspect thereof, the present invention pertains to a novel drug-screening kit, comprising the library of heterozygous fission yeast mutants.

[0079] The drug-screening kit of the present invention is used in the method for screening a drug's modes of action. In greater detail, the screening kit is utilized in screening novel drugs as well as a drug's modes of action by 1) culturing the library of heterozygous fission yeast mutants of the screening kit in media containing respective drug candidates and 2) comparatively analyzing the growth of the fission yeast mutants to detect growth-inhibited fission yeast mutants.

### MODE FOR INVENTION

[0080] A better understanding of the present invention may be obtained through the following examples which are set forth to illustrate, but are not to be construed as limiting the present invention.

### Example 1

### Construction of Deletion Cassette by Four-Round Serial PCR or Block PCR

[0081] Deletion cassettes can be constructed in two different PCR techniques: four-round serial PCR and block PCR. These two PCR-based methods are common in preparing a Kan^{r}-barcode module in advance. The base sequence of KanMX4 is well known in the art and is not described specifically. Primary PCR was performed with a pair of 70-mer 5′- and 3′-barcode primers, each containing a gene-specific barcode while KanMX4 served as a template to prepare a Kan^{r}-barcode module (FIG. 2). After electrophoresis on agarose gel stained with ethidium bromide (EtBR), the Kan^{r}-barcode module thus prepared was extracted from the gel by excising under a UV lamp.

[0082] The four-round serial PCR for constructing deletion cassettes is similar to the conventional one used for constructing gene-targeted budding yeast or fission yeast mutants, but different thereto in that 80-bp homologous recombination region is added to either ends of the deletion cassette (Giaever et al., Nature Genetics 14:450-56). Dr. Giaever et al. succeeded in targeting 90% or more of the total 6000 genes of the budding yeast by providing a 45-bp recombination region in one PCR, with Kan^{r}-barcode module serving as a template. As for the fission yeast, however, the 45-bp homologous recombination region is too short to effectively induce homologous recombination on the genome. Thus, the method used for the construction of gene-targeted fission yeast mutants was modified such that PCR was performed three times in series with a pair of 50-mer primers for first two rounds and with a pair of 40-mer primers for the last round, to give a 80-bp homologous recombination region together with a gene-specific barcode (FIG. 3).

[0083] This four-round serial PCR was successfully applied only to a quarter of the total 4,988 genes of the fission yeast, with a success rate of 50% or higher in the construction of mutant strains, but failed for the remaining three fourths. Thus, the homologous recombination region was extended using block PCR (FIG. 4). In the block PCR, 5′ and 3′ DNA fragments for chromosome-homologous recombination, each 350˜500 bp long, are separately synthesized by PCR and then subjected, together with the purified Kan^{r}-barcode module, to block PCR to prepare a deletion cassette in which the 5′ and 3′ 350˜500 bp DNA fragments are fused to 5′ and 3′ ends of the Kan^{r}-barcode module, respectively. As a result, the chromosome-homologous recombination regions in the deletion cassette are extended to 350˜500 bp from the 80 bp of the four-round serial PCR, remarkably increasing the construction efficiency of deletion mutants to 90% from 50%.

### Example 2

### Construction of Deletion Cassette by Gene Synthesis

[0084] Even the PCR technology described above failed to prepare gene-targeted mutants for as many as 4% of the total genes. The reason is because the high contents of both adenine (A) and thymine (T) in the promoter and the terminator of the gene do not allow for primer sites of conventional PCR. In consideration of this problem, the gene synthesis method was employed. The present invention is the first to use gene synthesis in constructing deletion cassettes and preparing deletion fission yeast mutants.

[0085] A deletion cassette was designed to consist of three fragments: 1) 5′ chromosome-homologous region bearing 5′ common liker sequence and 5′ barcode, 2) kanamycin resistance gene (Kan^{r}), and 3) 3′ barcode and 3′ chromosome-homologous region bearing 3′ common liker sequence. To connect these three fragments into a one line, overlapping link oligo-sequences are arranged between the fragments to be connected with each other (FIG. 5). A length of 250 bp was given as the length of the chromosome-homologous region, which is the most important factor to determine the construction efficiency of mutants. The 5′ chromosome-homologous region was identical to the chromosomal nucleotide sequence stretching in the direction toward the promoter from the initiation codon ATG by 250 bp while the 3′ chromosome-homologous region was identical to the chromosomal nucleotide sequence stretching in the direction toward poly-A from the stop codon TGA, TAG or TAA, by 250 bp.

[0086] The 5′ and the 3′ chromosome-homologous region, each 250 bp long, are different from one gene to another and the description of their nucleotide sequences is omitted because anyone skilled in the art can infer them.

[0087] The link oligo-sequences in the fragments to be linked to each other are designed to overlap with each other, with no gaps between the fragments, so that a double-stranded deletion cassette DNA fragment, albeit having nicks thereon between the fragments, can be obtained only by overlapping the oligo-sequences. On the basis of the Santa Lucia Calculations, all of the oligo-sequences were designed to have a Tm value of 60±3° C. (Santa Lucia PNAS. 95:1460-5). Two relatively short oligo-sequences, 12˜16 bp long, were respectively arranged at the opposite terminal regions of the deletion cassette, producing blunt ends. Then, treatment with ligase sealed the nicks to give an intact deletion cassette DNA template.

### Example 3

### Transformation of Deletion Cassette and Identification of Gene-Targeted Mutants

[0088] Using the lithium acetate method, the deletion cassette prepared through Examples 1 and 2 was transformed into diploid fission yeast SP286 strains (ade6-M210/ade6-M216, ura4-D18/ura4-D18, leu1-32/leu1-32) (Moreno et al., Methods Enzymol. 194:795-823). The transformed strains were spread over YES agar plates and cultured at 30° C. for 3˜4 days to form colonies. Colony PCR was performed to examine whether desired genes were targeted. A small amount of cells were picked from edges of grown colonies on agar plates and suspended in deionized water. A portion of the suspension was subjected to PCR with a pair of primers. As shown in FIG. 6, colony PCR was performed with a pair of CP5 and CPN1 or CPN10 for the 5′ side of the deletion cassette inserted into the chromosome and with a pair of CP3 and CPC1 or CPC3 for the 3′ side of the deletion cassette. CP5 and CP3 were located 100˜200 bp upstream and downstream of corresponding chromosome homologous regions, respectively. CPN1 and CPC1 were located within the KanMX4 gene, with a distance of 200 bp from 5′ and 3′ ends thereof, respectively, while CPN10 and CPC3 were also located within the KanMX4 gene, with a distance of 300 bp from 5′ and 3′ ends thereof, respectively. Accordingly the colony PCR products thus obtained had a length of 300˜400 bp plus the length of the chromosome homologous region, that is, 80˜450 bp, amounting to 500˜1,000 bp in total. Reference may be made to Korean Patent No. 10-0475645 for reaction conditions of colony PCR.

[0089] The base sequences of CP5 and CP3 which are different depending on the genes are not described in detail because they are readily apparent to those skilled in the art. Base sequences of CPN1, CPN10, CPC1 and CPC3 are given, along with their sequence identification numbers, in Table 3, below.

TABLE 3

| | | SEQ |
|---|---|---|
| Oligo | Base | ID |
| Names | Sequences | NOS. |
| CPN1 | 5′-CGTCTGTGAGGGGAGCGTTT-3′ | 1 |
| CPN10 | 5′-GATGTGAGAACTGTATCCTAGCAAG-3′ | 2 |
| CPC1 | 5′-TGATTTTGATGACGAGCGTAAT-3′ | 3 |
| CPC3 | 5′-GGCTGGCCTGTTGAACAAGTCTGGA-3′ | 4 |

### Example 4

### Determination of Base Sequences of Gene-Specific Barcodes and their PCR Amplification

[0090] Gene-specific barcodes must be needed in order to systemically identify strains using a microarray GeneChip as will be described in Example 5, below. In this regard, two gene-specific barcodes, each 20 bp, were given to 5′ and 3′ sides of the deletion cassette, respectively (FIG. 1). According to the gene database of the Sanger Institute, 4,988 genes are present in the fission yeast. Hence, as shown in FIGS. 7 to 55, a total of 9,976 barcodes were assigned to the 4,988 genes, with two per gene. The barcodes were named in such a manner that the systematic names of corresponding genes were followed by the extension _UP or _DN. For example, barcodes specific for the gene SPAC1002.09c were named SPAC1002.09c_UP for 5′ up-tag, identified by SEQ ID NO. 18, and SPAC1002.09c_DN for 3′ down-tag, identified by SEQ ID NO. 19 (FIG. 7). Barcodes were thus artificial DNA sequences which were not present on the chromosome of the fission yeast and were designed to have a Tm value of 60±1° C. according to a computer algorithm.

### Example 5

### Screening of A Drug's Mode of Action Using a Library of Gene-Targeted Diploid Fission Yeast Mutants

[0091] A modification of the Giaever's method for screening drug's modes of action in the budding yeast on the basis of haploinsufficiency was applied to the fission yeast in accordance with the present invention (FIG. 56) (Giaever et al., Nature Genetics 14:450-56., Pierce et al., Nature Protocols 11:2958-2974, Pierce et al., Nat Methods.:601-3).

[0092] The analysis of a drug's modes of action by use of a GeneChip comprises the following seven steps: 1) pooling of strain libraries, 2) activation, chemical treatment and sampling of a frozen strain pool, 3) isolation of chromosomal DNA and PCR amplification of barcode labels, 4) Order of GeneChip from Affymetrix, 5) hybridization, 6) staining, washing and colorimetry, and 7) result analysis.

[0093] 1) Pooling of Strain Libraries

[0094] A pool in which the mutants were equally mixed was prepared in the manner illustrated in FIG. 57. Because it was not easy to handle a library of 4,884 gene-targeted heterozygous mutants at the same time, they were divided into unit packages of 96 mutants. In detail, 96 mutants were cultured at 30° C. for 3 days on YES agar plates containing G418 at a concentration of 200 mg/ml, followed by incubation at 30° C. for 3 days on 96-well type plates. The strains cultured on the 51 plates were scraped, and suspended in 5.5 ml of respective 2×YES broths. After the addition of glycerol to the concentration of 30%, the 51 cultures were aliquoted at a volume of 1 ml and stored at −80° C. All of the 51 1 ml-aliquots in cryogenic storage were pooled together to afford a library of the mutants which was then aliquoted at a volume of 1 ml and stored at −80° C. A total of 5×10⁷ cells were used so that at least 10,000 cells were assigned to one mutant strain per one round of screening a drug's modes of action.

[0095] 2) Activation, Chemical Treatment and Sampling of Frozen Strain Pool

[0096] Prior to chemical treatment, the strain pool stored at −80° C. was activated. After being thawed, an aliquot of the strain pool was initially inoculated into a YES broth at O.D₆₀₀=0.2 and grown at 25° C. to O.D₆₀₀=2.0. These activated strains were diluted to a density of O.D₆₀₀=0.2 and treated with a chemical at a suitable concentration, followed by sampling therefrom once every three sub-cultures over a total of 20˜30 subcultures (typically 4 hours are required for one sub-culture of the fission yeast). Since it was easy to determine the inhibitory activity of the chemical on the growth of cells when the strains must grow at a constant rate without the influence of nutrients, the sampled strains were diluted again at a density of O.D₆₀₀=0.2 in fresh broth containing the chemical. A sample taken from chemical-free broth was used as a control. The samples were centrifuged to give cell pellets which were then stored at −80° C. Genomic DNA was isolated from all of the samples at the same time and subjected to GeneChip analysis.

[0097] In order to determine the concentration of the chemical for the treatment, 50% inhibitory concentration (IC₅₀) was first measured. Wild-type SP286 strain was grown to O.D₆₀₀=2.0 in YES broth and inoculated with from 5- to 10-fold serial dilutions of the chemical to O.D₆₀₀=0.1, followed by incubation at 30° C. for 24 hours. At each concentration of the chemical, the cultures were measured for final O.D₆₀₀ values which were then plotted against Log [Chemical Concentration]. On the basis of these plots, IC₅₀ values were automatically calculated using Prism Software (version 3.0, GraphPad Software Inc., San Diego, Calif.). Scientific experience made it possible to determine the concentrations of the chemical at around the appropriate IC₅₀ values.

[0098] 3) Isolation of chromosomal DNA and PCR Amplification of Barcode Label

[0099] Using a Fungal/Bacterial DNA kit (Zymo Research, catalog # D6005), 2-4 μg of genomic DNA was isolated from 200 mg of the cell sample. A 20-˜50-fold dilution of the isolated genomic DNA was mixed with a 200-fold dilution of Pico Green dye (Pico Green® dsDNA Assay Kit (Invitrogen Inc. cat # P11495) at a volume ratio of 1:1, followed by quantification with NanoDrop (ND-1000, NanoDrop Inc.). 200 ng of each sample was used for labeling PCR.

[0100] For use as probes in GeneChip, only the barcodes present in the isolated genomic DNAs were amplified by PCR using biotin-labeled primers. To this end, first, base sequences of common primers for the amplification of the 20-bp barcodes were determined. It was important to design the common primers which did not form non-specific bonds with the genome of the fission yeast. The base sequences determined through algorithm and serial experiments are given in Table 4, below. Biotin, serving as a label in the PCR amplification of the barcodes, was conjugated to the 5′-ends of the primers which are directed towards the kanamycin resistance gene. The PCR products of the 5′ and the 3′ barcode were 70 bp and 73 bp in length. Solutions and conditions for PCR amplification are summarized in Table 5, below. After completion of PCR, PCR products were analyzed for length and amount by the electrophoresis of 5 μl of the PCR reaction in 3% agarose gel and stored at 4° C. in a refrigerator until hybridization. About 30 μl of the PCR product was used for each hybridization.

TABLE 4

| | | | | SEQ |
|---|---|---|---|---|
| Oligo | | Direc- | Base | ID |
| Names | Positions | tions | Sequences | NOS. |
| U1 | 5′ Up- | Sense | 5′-GCTCCCGCCTTACTTCGCAT-3′ | 5 |
| U2 | tag | Anti- | 5′-Biotin-CGGGGACGAGGCAAGC | 6 |
| | | sense | TAA-3′ | |
| D1 | 3′ Down- | Sense | 5′-Biotin-GCCGCCATCCAGTGTC | 7 |
| | tag | | G-3′ | |
| D2 | | Anti- | 5′-TTGCGTTGCGTAGGGGGG-3′ | 8 |
| | | sense | | |

TABLE 5

| Sol'n | Stock | | Final Conc./Amount | | Volumes (μl) |
|---|---|---|---|---|---|
| Water (H₂O) | | | | | 75-x |
| PCR Buffer | 10X | | 1X | | 10 |
| MgCl₂ | 20 | mM | 2.5 | mM | 10 |
| dNTP | 10 | mM | 0.2 | mM | 2 |
| Primer Mix | 50 | uM | 1 | μM | 2 |
| Taq | 5 | U/μl | 5 | U | 1 |
| Polymerase | | | | | |

| | | | |
|---|---|---|---|
| Genomic | ~200 | ng | x |
| DNA | | | |

| | |
|---|---|
| Final Vol. | 100 |

| | |
|---|---|
| PCR | 94° C., 2 min, 1 cycle - (94° C., 30 s; 58° C., 30 s; |
| Conditions | 72° C., 30 s) 29 cycles - 72° C., 3 min, 1 cycle |

[0101] 4) Order of GeneChip from Affymetrix

[0102] A made-to-order GeneChip with serial number KRIBBSP1-a520429 from Affymetrix was used to recognize the 20-bp barcodes specifically inserted into the mutant strains (FIG. 58). On this DNA chip with a size of 0.8×0.8 cm were planted 100,000 probes which each have a feature of 11×11 μm. The probes consisted of 1) perfect match (PM) and mismatch (due to mismatch bases assigned to middle sites of barcodes) with 5′ and 3′ barcodes (each 10,000) in triplicate (60,000 in total); 2) 10,000 control probes for minimizing false positive signals induced by non-specific hybridization; 3) 20,000 spare probes for barcodes; and 4) 10,000 basic structure probes necessary for indicating the manufacturer Affymetrix and Oligo texts and compartmenting.

[0103] 5) Hybridization

[0104] Hybridization between the GeneChip from Affymetrix and the probes obtained by PCR in 3) was conducted as follows. As shown in Table 6, first, the hybridization solution comprising a biotin-labeled text oligo-mix and a blocking oligo-mix in addition to the biotin-labeled barcode probes was mixed in a 1.5 ml tube. The biotin-labeled text oligo-mix gave a standard to the optical recognition system upon analysis on the GeneChip. The blocking oligo-mix composed of 8 oligonucleotides served to block the common primers within the barcode and the gap between the primers and the barcode to expose only the 20-bp barcodes in single strands, thereby allowing the sense single strands to hybridize with the antisense probe oligonucleotides of the GeneChip. Each of the 8 oligonucleotides was used as a 300 pM stock. In the blocking oligo-mix, 5U-Block, K5U-Block, 5U-Block (rev comp) and K5U-Block (rev comp) were each present at a concentration of 37.5 pmole/μl while 3U-Block, K3U-Block, 3U-Block (rev comp) and K3U-Block (rev comp) were each present at a concentration of 12.5 pmole/μl. Immediately after being boiled at 98° C. for 5 min, the hybridization solution was quenched in ice water to expose the 20-bp sense barcode sequences in single strands. To the GeneChip which was pre-treated for 5 min with 140 μl of hybridization buffer was injected 140 μl of the hybridization solution, followed by hybridization at 42° C. for 16 hours.

TABLE 6

| | | | | SEQ |
|---|---|---|---|---|
| | | Compositions and Base | Vol | ID |
| Solutions | | Sequences | (μl) | NOS. |
| 5′ Up- and | | 4,884 Gene-specific | 60 | |
| 3′ Down-tag | | Up and Down barcodes | (each | |
| | | | 30) | |
| 2× Hybridization | | 200 mM MES, 2 M Na+, 40 mM | 75 | |
| Buffer | | EDTA 0.02% Tween20 | | |
| Text Oligo | | 5′-biotin- | 0.5 | 9 |
| (20 fmole/μl) | | GTCGTCAAGATGCTACCGTTCAGGA-3′ | | |
| Blocking | 5U-Block | 5′-CGCTCCCGCCTTACTTCGCATTTAAA-3′ | 12 | 10 |
| Oligo- | | | | |
| Mix | K5U-Block | 5′-GGGGACGAGGCAAGCTAAGATATC-3′ | | 11 |
| | 3U-Block | 5′-TTGCGTTGCGTAGGGGGGATTTTAAA-3′ | 12 | 12 |
| | K3U-Block | 5′-CGCCATCCAGTGTCGAAAAGTATC-3′ | | 13 |
| | 5U-Block | 5′-TTTAAATGCGAAGTAAGGCGGGAGCG-3′ | | 14 |
| | (rev comp) | | | |
| | K5U-Block | 5′-GATATCTTAGCTTGCCTCGTCCCC-3′ | | 15 |
| | (rev comp) | | | |
| | 3U-Block | 5′-TTTAAAATCCCCCCTACGCAACGCAA-3′ | | 16 |
| | (rev comp) | | | |
| | K3U-Block | 5′-GATACTTTTCGACACTGGATGGCG-3′ | | 17 |
| | (rev comp) | | | |
| 50× Denhardt's Sol'n | | 1% Ficoll 400, 1% PVP, 1% BSA | 3 | |
| | | Total volume | 150.5 | |

[0105] 6) Staining and Washing and Colorimetry

[0106] After completion of the hybridization, the GeneChip was stained with phycoerythrin-conjugated streptavidin using a fluidics station (Affymetrix). Streptavidin was strongly bound to the biotin to give fluorescence, affording the quantification of the biotin-labeled barcodes hybridized with the probes on the GeneChip.

[0107] The Fluidics station was used according to the protocol recommended by the manufacturer using staining solution (600 μl: 20×SSPE 180.57 μl+50×Denhart's solution 11.94 μl+10% Tween20 0.597 μl+phycoerythrin-conjugated streptavidin 1.019 μl+deionized water 405.874 μl) and a washing solution (Wash A: 20×SSPE 300 ml, 10% Tween 1 ml, distilled water 699 ml in 1 liter; Wash B: 20×SSPE 150 ml, 10% Tween 1 ml, distilled water 849 ml in 1 liter). Thereafter, the GeneChip was scanned with GeneChip® Scanner 3000 G7 (Affymetrix) to detect fluorescence.

TABLE 7

| Conditions | No. of Round | Notes |
|---|---|---|
| Wash A1 Recovery Mixes | 0 | |
| Wash A1 Temperature (° C.) 25 | | |
| Number of Wash A1 Cycle 2 | | |
| Mixes per Wash A1 Cycle | 4 | |
| Wash B Recovery Mixes | 0 | |
| Wash B Temperature (° C.) | 42 | |
| Number of Wash B Cycle | 6 | |
| Mixes per Wash B Cycle | 4 | |
| Stain Temperature (° C.) | 25 | |
| First Stain Time (seconds) | 0 | (dummy step) |
| Wash A2 Recovery Mixes | 0 | (dummy step) |
| Wash A2 Temperature (° C.) 25 | | |
| Number of Wash A2 Cycle 1 | | |
| Mixes per Wash A2 Cycle | 2 | |
| Second Stain Time (seconds) | 600 | |
| Third Stain Time (seconds) | 0 | (dummy step) |
| Wash A3 Recovery Mixes | 0 | (dummy step) |
| Wash A3 Temperature (° C.) 25 | | |
| Number of Wash A3 Cycles | 6 | |
| Mixes per Wash A3 Cycle | 4 | |
| Holding Temperature (° C.) | 25 | |

[0108] 7) Result Analysis

[0109] The binding between the PCR-amplified gene-specific sense barcodes and the antisense oligonucleotide probes planted on the GeneChip could be quantified by the fluorescent intensity detected. The fluorescence values measured were stored in files with the extension name cel. Strong fluorescent intensity means that cells with corresponding genes are predominantly growing. On the other hand, weak fluorescent intensity means the inhibition of cell growth. Based on the ANOVA/ANCOVA model, fluorescent data from the GeneChip were analyzed for the heterozygous gene-targeted mutants which were inhibited from growing.

[0110] According to the ANCOVA model, the drug-induced inhibition of cell growth is expressed as the reduced passage number which can be obtained according to the following formula.

Reduced passage No. by drug in unit time (12 hrs)=Changed passage No. upon drug treatment in unit time (12 hrs)−Changed passage No. in the absence of drug in unit time (12 hrs)

[0111] Passage No. is calculated according to the following formula:

Passage No.=Log₂ (Fluorescent Intensity of Gene X at a predetermined time)−Log₂ (Fluorescent Intensity of Gene X at the previous time)

### Example 6

### Screening of Terbinafine's Modes of Action Using GeneChip and Verification

[0112] In order to screen terbinafine's modes of action with the GeneChip, first, the treatment concentrations of drug were determined by the measurements of IC₅₀ obtained in the above-mentioned method. In this regard, relative rates of drug-induced inhibition against cell growth were obtained by treating the cells with terbinafine at doses of 0.1 nM, 1 nM, 5 nM, 10 nM, 50 nM, 100 nM, 500 nM and 1 nM. Analysis with Prism software determined IC₅₀=40 nM (FIG. 11).

[0113] After the treatment of a strain pool with 40 nM of terbinafine, as shown in Table 8, samples were taken every three passages (approximately 12 hours) till 30˜35 passages, GeneChip analysis was performed with 13 controls and 12 drug-treated samples.

TABLE 8

| | | | Accumulated | |
|---|---|---|---|---|
| Chip | Specimen | Specimen | Passages | Passage |
| Nos. | Group | Names | (Round) | Time(h) |
| 1 | Chip control: | Strain mix in Glycerol | | |
| 2 | Cell activation | Activation Stage 1 | | 6.9 |
| 3 | | Activation Stage 2 | | 6.7 |
| 4 | | Activation Stage 3 | | 4.2 |
| 5 | Drug control: | Control Data Point 1 | 3.1 | 3.6 |
| 6 | YES media | Control Data Point 2 | 6.6 | 3.9 |
| 7 | | Control Data Point 3 | 9.4 | 3.6 |
| 8 | | Control Data Point 4 | 12.8 | 3.8 |
| 9 | | Control Data Point 5 | 16.7 | 3.7 |
| 10 | | Control Data Point 6 | 21.2 | 3.6 |
| 11 | | Control Data Point 7 | 25.6 | 3.5 |
| 12 | | Control Data Point 8 | 32.7 | 3.4 |
| 13 | | Control Data Point 9 | 35.9 | 3.8 |
| 14 | Drug-Treated: | Drug Data Point 1 | 3.1 | 3.6 |
| 15 | YES + 40 nM | Drug Data Point 2 | 6.3 | 4.3 |
| 16 | Terbinafine | Drug Data Point 3 | 8.6 | 4.3 |
| 17 | | Drug Data Point 4 | 10.9 | 5.6 |
| 18 | | Drug Data Point 5 | 13.7 | 5.2 |
| 19 | | Drug Data Point 6 | 17.1 | 4.7 |
| 20 | | Drug Data Point 7 | 20.9 | 4.0 |
| 21 | | Drug Data Point 8 | 23.8 | 4.0 |
| 22 | | Drug Data Point 9 | 26.7 | 4.5 |
| 23 | | Drug Data Point 10 | 29.5 | 4.1 |
| 24 | | Drug Data Point 11 | 32.3 | 4.3 |
| 25 | | Drug Data Point 12 | 34.9 | 4.4 |

[0114] The gene candidates which were ranked as the top 10 (or top 20) by ANCOVA analysis, defined as cell growth over time after treatment with terbinafine, are summarized in Table 9, below. The erg1 gene, known as a terbinafine's mode of action, codes for squalene monooxygenase, which plays an important role in the biosynthesis of the membrane component ergosterol. The screening of terbinafine's modes of action with the conventional budding yeast also resulted in a first ranking for the erg1 gene. This coincidence demonstrates that the system of screening drug's modes of action with a library of the gene-targeted fission yeast mutants in accordance with the present invention works properly.

[0115] Since the drug's modes of action detected with the GeneChip might include the false positive signals resulting experiment errors and false chip analysis, all the top 10 drug's modes of action, except non-specific ribosome-related genes, were cultured again on YES agar plates containing terbinafine. As shown in FIG. 60, the same results as in the chip were obtained for the genes erg1 and pmm1 whereas there was a difference from the chip result on the smb1 gene. Therefore, the genes erg1 and pmm1 within the red boxes were verified as being targets of terbinafine.

[0116] Taken together, the data obtained in the examples demonstrate that the present invention is very useful in accurately searching for novel drug's modes of action as well as already known target proteins.

TABLE 9

| | Systematic | Target | |
|---|---|---|---|
| Nos. | Gene Names | Genes | Description of Genes |
| 1 | SPBC713.12 | erg1 | squalene monooxygenase Erg1 (predicted); similar to |
| | | | S. cerevisiae YGR175C |
| 2 | SPCC622.06c | | dubious; similar to S. pombe SPCC622.03c; tandem |
| | | | duplication; ORF in compositionally biased region |
| 3 | SPAC24H6.07 | rps901 | 40S ribosomal protein S9; similar to S. cerevisiae |
| | | | YPL081W and YBR189W; similar to S. pombe rps902 |
| 4 | SPBP23A10.07 | rpa2 | DNA-directed RNA polymerase I complex subunit Rpa2; |
| | | | similar to S. cerevisiae YPR010C |
| 5 | SPAC26A3.08 | smb1 | small nuclear ribonucleoprotein (snRNP) (subunit B); |
| | | | complexed with Cdc5p (PMID 11884590); similar to |
| | | | S. cerevisiae YER029C |
| 6 | SPBC17G9.07 | rps2402 | 40S ribosomal protein S24; similar to S. cerevisiae |
| | | | YER074W and YIL069C |
| 7 | SPAC1F7.13c | rpl801 | 60S ribosomal protein L2A; similar to S. cerevisiae |
| | | | YFR031C-A and YIL018W |
| 8 | SPBC12D12.03 | cct1 | chaperonin-containing T-complex alpha subunit Cct1; |
| | | | similar to S. cerevisiae YDR212W |
| 9 | SPCC1223.05c | rpl3702 | 60S ribosomal protein L37; similar to S. cerevisiae |
| | | | YLR185W and YDR500C |
| 10 | SPAC1556.07 | pmm1 | phosphomannomutase; similar to S. cerevisiae YFL045C |

### INDUSTRIAL APPLICABILITY

[0117] As described hitherto, the present invention provides a deletion cassette with two 20-mer gene-specific barcodes and two 250-˜350-bp homologous regions at both ends thereof, which is very useful in constructing gene-targeted yeast mutants. A library of the heterozygous gene-targeted yeast mutants can be used to systematically screen a drug's modes of action on a genomic level, thus affording the effective development of new drugs.

[0118] Although the preferred embodiments of the present invention have been disclosed for illustrative purposes, those skilled in the art will appreciate that various modifications, additions and substitutions are possible, without departing from the scope and spirit of the invention as disclosed in the accompanying claims.

1. A method for constructing gene-targeted heterozygous fission yeast mutants, comprising introducing a deletion cassette for gene targeting into a fission yeast strain, said deletion cassette comprising a selectable marker gene; a pair of gene-specific barcode base sequences, positioned respectively at both flanks of the selectable marker gene, for a microarray; and a pair of homologous recombination regions, assigned respectively to sides of the barcode base sequences positioned at upstream and downstream of the selectable marker gene, in which each of the homologous recombination regions is more than 150 bp in length.

2. The method according to claim 1, wherein each of the homologous recombination regions ranges in length from 150 bp to 450 bp.

3. The method according to claim 1, wherein each of the homologous recombination regions ranges in length from 250 bp to 450 bp.

4. The method according to claim 1, wherein the deletion cassette is constructed by four-round serial PCR, block PCR or gene synthesis.

5. The method according to claim 1, wherein each of the barcode base sequences ranges in length from 20 to 30 bp.

6. The method according to claim 1, wherein the barcode base sequences are selected from a group consisting of the base sequences shown in FIGS. 7 to 55 and two of the barcode base sequences are respectively assigned upstream and downstream of the selectable marker gene.

7. The method according to claim 1, wherein the selectable marker gene is a kanamycin resistance gene.

8. A gene-targeted heterozygous fission yeast strain, transformed by a deletion cassette comprising a selectable marker gene; a pair of gene-specific barcode base sequences, positioned respectively at both flanks of the selectable marker gene, for a microarray, and a pair of homologous recombination regions, assigned to sides of respective barcode base sequences, said barcode base sequences being selected from a group consisting of the base sequences shown in FIGS. 7 to 55, with two respectively assigned upstream and downstream of the selectable marker gene.

9. The gene-targeted heterozygous fission yeast strain according to claim 8, wherein the selectable marker gene is a kanamycin resistance gene.

10. A gene-targeted heterozygous fission yeast mutant library introducing a deletion cassette to each gene of fission yeast, wherein the deletion cassette comprises a selectable marker gene and a pair of gene-specific barcode base sequences positioned respectively at both flanks of the selectable marker gene to each gene of fission yeast, and the gene-specific barcode base sequences are selected from a group consisting of the base sequences shown in FIGS. 7 to 55.

11. The gene-targeted heterozygous fission yeast mutant library according to claim 10, wherein the selectable marker gene is a kanamycin resistance gene.

12. A method of screening a drug's mode of action, comprising:
1) treating the gene-targeted heterozygous fission yeast mutant library of claim 10 or 11 with a chemical;
2) culturing the chemically treated fission yeast mutant library;
3) isolating genomic DNA from the cultured library; and
4) measuring and analyzing growth rates of the mutants with the isolated genomic DNA applied on microarray gene chips to detect strains whose relative growth is inhibited.

13. A method of screening a drug's mode of action, comprising:
1) treating the gene-targeted heterozygous fission yeast mutant library of claim 10 or 11 with a chemical;
2) culturing the chemically treated fission yeast mutant library;
3) isolating genomic DNA from the cultured library; and
4) measuring and analyzing growth rates of the mutants by quantitative real-time PCR with the isolated genomic DNA to detect strains whose relative growth is inhibited.

14. A screening kit for a drug's modes of action, comprising the gene-targeted heterozygous fission yeast mutant library of claim 10.

The application's sequence listing, which the Patent Office published only in electronic form, follows.

SEQUENCE LISTING (9993 sequences)

SEQ ID NO: 1 - DNA, 20 bp, Artificial
  confirm PCR primer
cgtctgtgaggggagcgttt

SEQ ID NO: 2 - DNA, 25 bp, Artificial
  confirm PCR primer
gatgtgagaactgtatcctagcaag

SEQ ID NO: 3 - DNA, 22 bp, Artificial
  confirm PCR primer
tgattttgatgacgagcgtaat

SEQ ID NO: 4 - DNA, 25 bp, Artificial
  confirm PCR primer
ggctggcctgttgaacaagtctgga

SEQ ID NO: 5 - DNA, 20 bp, Artificial
  UP tag priming sequence 1 (U1)
gctcccgccttacttcgcat

SEQ ID NO: 6 - DNA, 19 bp, Artificial
  UP tag priming sequence 2 (U2)
cggggacgaggcaagctaa

SEQ ID NO: 7 - DNA, 17 bp, Artificial
  DOWN tag priming sequence 1 (D1)
gccgccatccagtgtcg

SEQ ID NO: 8 - DNA, 18 bp, Artificial
  DOWN tag priming sequence 2 (D2)
ttgcgttgcgtagggggg

SEQ ID NO: 9 - DNA, 25 bp, Artificial
  at_KRIBB_SP1
gtcgtcaagatgctaccgttcagga

SEQ ID NO: 10 - DNA, 26 bp, Artificial
  Blocking oligonucleotide
cgctcccgccttacttcgcatttaaa

SEQ ID NO: 11 - DNA, 24 bp, Artificial
  Blocking oligonucleotide
ggggacgaggcaagctaagatatc

SEQ ID NO: 12 - DNA, 26 bp, Artificial
  Blocking oligonucleotide
ttgcgttgcgtaggggggattttaaa

SEQ ID NO: 13 - DNA, 24 bp, Artificial
  Blocking oligonucleotide
cgccatccagtgtcgaaaagtatc

SEQ ID NO: 14 - DNA, 26 bp, Artificial
  Blocking oligonucleotide
tttaaatgcgaagtaaggcgggagcg

SEQ ID NO: 15 - DNA, 24 bp, Artificial
  Blocking oligonucleotide
gatatcttagcttgcctcgtcccc

SEQ ID NO: 16 - DNA, 26 bp, Artificial
  Blocking oligonucleotide
tttaaaatcccccctacgcaacgcaa

SEQ ID NO: 17 - DNA, 24 bp, Artificial
  Blocking oligonucleotide
gatacttttcgacactggatggcg

SEQ ID NO: 18 - DNA, 20 bp, Artificial
  20-mer unique DNA sequence
aacggctcagaccactgtcg

SEQ ID NO: 19 - DNA, 20 bp, Artificial
  20-mer unique DNA sequence
gaaaatgggagggagcgcgc

SEQ ID NO: 20 - DNA, 20 bp, Artificial
  20-mer unique DNA sequence
ctccgtggtcacaacccgaa

SEQ ID NO: 21 - DNA, 20 bp, Artificial
  20-mer unique DNA sequence
gtccgagagtcggcacgaat

SEQ ID NO: 22 - DNA, 20 bp, Artificial
  20-mer unique DNA sequence
tggaggttgaaaggggggct

SEQ ID NO: 23 - DNA, 20 bp, Artificial
  20-mer unique DNA sequence
caagatgctgccgggaaacg

SEQ ID NO: 24 - DNA, 20 bp, Artificial
  20-mer unique DNA sequence
acgcatagtgccctgagctg

SEQ ID NO: 25 - DNA, 20 bp, Artificial
  20-mer unique DNA sequence
gcgtgtagtgcagctgtgtc

SEQ ID NO: 26 - DNA, 20 bp, Artificial
  20-mer unique DNA sequence
tcaggcttgggatcgcggaa

SEQ ID NO: 27 - DNA, 20 bp, Artificial
  20-mer unique DNA sequence
gatgggccggcagcagataa

SEQ ID NO: 28 - DNA, 20 bp, Artificial
  20-mer unique DNA sequence
gcacggggggaactcacagc

SEQ ID NO: 29 - DNA, 20 bp, Artificial
  20-mer unique DNA sequence
tgtatgtcgggtggcgggta

SEQ ID NO: 30 - DNA, 20 bp, Artificial
  20-mer unique DNA sequence
ctctttcgtccgccgcttcc

SEQ ID NO: 31 - DNA, 20 bp, Artificial
  20-mer unique DNA sequence
cagggcgtgagtggggcaag

SEQ ID NO: 32 - DNA, 20 bp, Artificial
  20-mer unique DNA sequence
agatccgaggggaacccagc

SEQ ID NO: 33 - DNA, 20 bp, Artificial
  20-mer unique DNA sequence
ccaatgctgtaggcggggtc

SEQ ID NO: 34 - DNA, 20 bp, Artificial
  20-mer unique DNA sequence
gctggtccacaaaacgccct

SEQ ID NO: 35 - DNA, 20 bp, Artificial
  20-mer unique DNA sequence
cgttgcggtttattgctcgc

SEQ ID NO: 36 - DNA, 20 bp, Artificial
  20-mer unique DNA sequence
gttcctgcccgtctttcccc

SEQ ID NO: 37 - DNA, 20 bp, Artificial
  20-mer unique DNA sequence
ttctgagcttgacggggcgc

SEQ ID NO: 38 - DNA, 20 bp, Artificial
  20-mer unique DNA sequence
tatctgcgctaggggtcgcc

SEQ ID NO: 39 - DNA, 20 bp, Artificial
  20-mer unique DNA sequence
tgccccgtcgcttccttacc

SEQ ID NO: 40 - DNA, 20 bp, Artificial
  20-mer unique DNA sequence
gtctgtgctgtgtgcgcggg

SEQ ID NO: 41 - DNA, 20 bp, Artificial
  20-mer unique DNA sequence
tctctcggcattgggggggt

SEQ ID NO: 42 - DNA, 20 bp, Artificial
  20-mer unique DNA sequence
cgtacaccgccgcaaacaag

SEQ ID NO: 43 - DNA, 20 bp, Artificial
  20-mer unique DNA sequence
cccacaaacaacggcacgga

SEQ ID NO: 44 - DNA, 20 bp, Artificial
  20-mer unique DNA sequence
gctcgggggtagggtggaca

SEQ ID NO: 45 - DNA, 20 bp, Artificial
  20-mer unique DNA sequence
cacccttcgctgcccattga

SEQ ID NO: 46 - DNA, 20 bp, Artificial
  20-mer unique DNA sequence
cgttcgatgtgggggttttt

SEQ ID NO: 47 - DNA, 20 bp, Artificial
  20-mer unique DNA sequence
cgagcccaatgcatagcccc

SEQ ID NO: 48 - DNA, 20 bp, Artificial
  20-mer unique DNA sequence
ggtggcattggggctttcga

SEQ ID NO: 49 - DNA, 20 bp, Artificial
  20-mer unique DNA sequence
tccatcgcgaaacacagcct

SEQ ID NO: 50 - DNA, 20 bp, Artificial
  20-mer unique DNA sequence
ccgaaaaccgacccaacacc

SEQ ID NO: 51 - DNA, 20 bp, Artificial
  20-mer unique DNA sequence
cggagggtacgccaatggaa

SEQ ID NO: 52 - DNA, 20 bp, Artificial
  20-mer unique DNA sequence
cccgtctgctcgccactttg

SEQ ID NO: 53 - DNA, 20 bp, Artificial
  20-mer unique DNA sequence
gagcgggtcgggagaggttt

SEQ ID NO: 54 - DNA, 20 bp, Artificial
  20-mer unique DNA sequence
ccccaagacaacgcgccaac

SEQ ID NO: 55 - DNA, 20 bp, Artificial
  20-mer unique DNA sequence
ttgggcgacggctagcatct

SEQ ID NO: 56 - DNA, 20 bp, Artificial
  20-mer unique DNA sequence
acggctcgatgaaacccctg

SEQ ID NO: 57 - DNA, 20 bp, Artificial
  20-mer unique DNA sequence
gctctccatcgacgttccgc

SEQ ID NO: 58 - DNA, 20 bp, Artificial
  20-mer unique DNA sequence
ggttgtgcagcgagggcgtt

SEQ ID NO: 59 - DNA, 20 bp, Artificial
  20-mer unique DNA sequence
accccgacccgaaagccatc

SEQ ID NO: 60 - DNA, 20 bp, Artificial
  20-mer unique DNA sequence
tcccccgtggctcttcgttt

SEQ ID NO: 61 - DNA, 20 bp, Artificial
  20-mer unique DNA sequence
gtttcagtcaagtcgggggc

SEQ ID NO: 62 - DNA, 20 bp, Artificial
  20-mer unique DNA sequence
ataccagacccgtttcgccg

SEQ ID NO: 63 - DNA, 20 bp, Artificial
  20-mer unique DNA sequence
agtcgcgtagggggcgggtc

SEQ ID NO: 64 - DNA, 20 bp, Artificial
  20-mer unique DNA sequence
aggaggataacggcacggga

SEQ ID NO: 65 - DNA, 20 bp, Artificial
  20-mer unique DNA sequence
actgggggtggttaatggcg

SEQ ID NO: 66 - DNA, 20 bp, Artificial
  20-mer unique DNA sequence
tcggaaccccaaggcaaaca

SEQ ID NO: 67 - DNA, 20 bp, Artificial
  20-mer unique DNA sequence
gccggcctaacgctatccca

SEQ ID NO: 68 - DNA, 20 bp, Artificial
  20-mer unique DNA sequence
ccaccgccgcatatgttccc

SEQ ID NO: 69 - DNA, 20 bp, Artificial
  20-mer unique DNA sequence
gcctcccgaccatgcacttt

SEQ ID NO: 70 - DNA, 20 bp, Artificial
  20-mer unique DNA sequence
accagtgaaacgaagccgcg

SEQ ID NO: 71 - DNA, 20 bp, Artificial
  20-mer unique DNA sequence
cacaactcgaccccccgctt

SEQ ID NO: 72 - DNA, 20 bp, Artificial
  20-mer unique DNA sequence
aagttgcggcctagtggcct

SEQ ID NO: 73 - DNA, 20 bp, Artificial
  20-mer unique DNA sequence
gacggtgtgggggcgaaggt

SEQ ID NO: 74 - DNA, 20 bp, Artificial
  20-mer unique DNA sequence
gggggcgggcatcgattata

SEQ ID NO: 75 - DNA, 20 bp, Artificial
  20-mer unique DNA sequence
ttgcggggctgtcggtgata

SEQ ID NO: 76 - DNA, 20 bp, Artificial
  20-mer unique DNA sequence
atgcaggtggagggaacggg

SEQ ID NO: 77 - DNA, 20 bp, Artificial
  20-mer unique DNA sequence
cgtaactttgtgcccgcgtg

SEQ ID NO: 78 - DNA, 20 bp, Artificial
  20-mer unique DNA sequence
gaatggcagtggcgggaagc

SEQ ID NO: 79 - DNA, 20 bp, Artificial
  20-mer unique DNA sequence
cgggacgacaagggaggaga

SEQ ID NO: 80 - DNA, 20 bp, Artificial
  20-mer unique DNA sequence
cgtccctgcgcaataagctg

SEQ ID NO: 81 - DNA, 20 bp, Artificial
  20-mer unique DNA sequence
ccaggtcccgctcacttccc

SEQ ID NO: 82 - DNA, 20 bp, Artificial
  20-mer unique DNA sequence
cttccaccgacggaccaaca

SEQ ID NO: 83 - DNA, 20 bp, Artificial
  20-mer unique DNA sequence
tttttatggccgggatcgcg

SEQ ID NO: 84 - DNA, 20 bp, Artificial
  20-mer unique DNA sequence
cgcgtggtcttgtcggtgaa

SEQ ID NO: 85 - DNA, 20 bp, Artificial
  20-mer unique DNA sequence
cgatcccctaccagccccgt

SEQ ID NO: 86 - DNA, 20 bp, Artificial
  20-mer unique DNA sequence
cctcacggcatgtgcgtgtt

SEQ ID NO: 87 - DNA, 20 bp, Artificial
  20-mer unique DNA sequence
gcccacgtagcggataacct

SEQ ID NO: 88 - DNA, 20 bp, Artificial
  20-mer unique DNA sequence
tccccgacgcacacgaagat

SEQ ID NO: 89 - DNA, 20 bp, Artificial
  20-mer unique DNA sequence
ccgcaaacaggaggcaatcg

SEQ ID NO: 90 - DNA, 20 bp, Artificial
  20-mer unique DNA sequence
tgtcgacggactcctcacga

SEQ ID NO: 91 - DNA, 20 bp, Artificial
  20-mer unique DNA sequence
ctccgtaatcggcgcgaatg

SEQ ID NO: 92 - DNA, 20 bp, Artificial
  20-mer unique DNA sequence
tgtcgagtgggcgcgttatc

SEQ ID NO: 93 - DNA, 20 bp, Artificial
  20-mer unique DNA sequence
tctgtcataaccgccgccga

SEQ ID NO: 94 - DNA, 20 bp, Artificial
  20-mer unique DNA sequence
acgacgcggtagtaacccct

SEQ ID NO: 95 - DNA, 20 bp, Artificial
  20-mer unique DNA sequence
tgagtccggtcgataggggt

SEQ ID NO: 96 - DNA, 20 bp, Artificial
  20-mer unique DNA sequence
agcggaaggaagagggagcc

SEQ ID NO: 97 - DNA, 20 bp, Artificial
  20-mer unique DNA sequence
gggtgtttgtcggggggcac

SEQ ID NO: 98 - DNA, 20 bp, Artificial
  20-mer unique DNA sequence
tccgcctctgcccacctgac

SEQ ID NO: 99 - DNA, 20 bp, Artificial
  20-mer unique DNA sequence
gacggttgcaaggtggctgg

SEQ ID NO: 100 - DNA, 20 bp, Artificial
  20-mer unique DNA sequence
aggggatccagtgcggcttt

SEQ ID NO: 101 - DNA, 20 bp, Artificial
  20-mer unique DNA sequence
catccccgtacccacccctg

SEQ ID NO: 102 - DNA, 20 bp, Artificial
  20-mer unique DNA sequence
gggatttcgacgtggttgca

SEQ ID NO: 103 - DNA, 20 bp, Artificial
  20-mer unique DNA sequence
gccctaccagattgccagcg

SEQ ID NO: 104 - DNA, 20 bp, Artificial
  20-mer unique DNA sequence
cgacgtcacgccgatcctta

SEQ ID NO: 105 - DNA, 20 bp, Artificial
  20-mer unique DNA sequence
gacgagtgtgaccgtgcaga

SEQ ID NO: 106 - DNA, 20 bp, Artificial
  20-mer unique DNA sequence
tgacataatcgaggggcggg

SEQ ID NO: 107 - DNA, 20 bp, Artificial
  20-mer unique DNA sequence
aaactgccgatgcctgaccg

SEQ ID NO: 108 - DNA, 20 bp, Artificial
  20-mer unique DNA sequence
tgcggcggaatcagttaggg

SEQ ID NO: 109 - DNA, 20 bp, Artificial
  20-mer unique DNA sequence
cgtatgcgagctcggaaggt

SEQ ID NO: 110 - DNA, 20 bp, Artificial
  20-mer unique DNA sequence
cacggggcaatggagagacg

SEQ ID NO: 111 - DNA, 20 bp, Artificial
  20-mer unique DNA sequence
tgagcgcggagggaagaagg

SEQ ID NO: 112 - DNA, 20 bp, Artificial
  20-mer unique DNA sequence
gtgttgttcatgggcgcgga

SEQ ID NO: 113 - DNA, 20 bp, Artificial
  20-mer unique DNA sequence
gctgtgtgagctgacgccat

SEQ ID NO: 114 - DNA, 20 bp, Artificial
  20-mer unique DNA sequence
acgcgagggttcaaggcaga

SEQ ID NO: 115 - DNA, 20 bp, Artificial
  20-mer unique DNA sequence
gaacgaaaccgatcgcgctc

SEQ ID NO: 116 - DNA, 20 bp, Artificial
  20-mer unique DNA sequence
agtaccgagggaggcgcgaa

SEQ ID NO: 117 - DNA, 20 bp, Artificial
  20-mer unique DNA sequence
gggggggagtgtgaacgcag

SEQ ID NO: 118 - DNA, 20 bp, Artificial
  20-mer unique DNA sequence
tgcgagagtgccgacgtgat

SEQ ID NO: 119 - DNA, 20 bp, Artificial
  20-mer unique DNA sequence
aatgcgctgacaggtctcgc

SEQ ID NO: 120 - DNA, 20 bp, Artificial
  20-mer unique DNA sequence
tggtgagcaggcagcgattt

SEQ ID NO: 121 - DNA, 20 bp, Artificial
  20-mer unique DNA sequence
tgcgtgaacacgggccagat

SEQ ID NO: 122 - DNA, 20 bp, Artificial
  20-mer unique DNA sequence
cggattgttgaacggtgggg

SEQ ID NO: 123 - DNA, 20 bp, Artificial
  20-mer unique DNA sequence
tgcgtgtctcgctcggttct

SEQ ID NO: 124 - DNA, 20 bp, Artificial
  20-mer unique DNA sequence
cacccaagcttcgccacacc

SEQ ID NO: 125 - DNA, 20 bp, Artificial
  20-mer unique DNA sequence
cctctccttccgcgcctctt

SEQ ID NO: 126 - DNA, 20 bp, Artificial
  20-mer unique DNA sequence
gggaaccagcggggcgatag

SEQ ID NO: 127 - DNA, 20 bp, Artificial
  20-mer unique DNA sequence
acttgcttccgggttcgatg

SEQ ID NO: 128 - DNA, 20 bp, Artificial
  20-mer unique DNA sequence
ccgtgtgcgaagccagaaaa

SEQ ID NO: 129 - DNA, 20 bp, Artificial
  20-mer unique DNA sequence
gcgcctctgccactcccaac

SEQ ID NO: 130 - DNA, 20 bp, Artificial
  20-mer unique DNA sequence
gggcaaaaggacgtgggtgg

SEQ ID NO: 131 - DNA, 20 bp, Artificial
  20-mer unique DNA sequence
gctatcggttttgggcggga

SEQ ID NO: 132 - DNA, 20 bp, Artificial
  20-mer unique DNA sequence
gggcgagtcgaacctcatct

SEQ ID NO: 133 - DNA, 20 bp, Artificial
  20-mer unique DNA sequence
tgcggctcactgggggatta

SEQ ID NO: 134 - DNA, 20 bp, Artificial
  20-mer unique DNA sequence
tactccgttccccacccgct

SEQ ID NO: 135 - DNA, 20 bp, Artificial
  20-mer unique DNA sequence
ttagggtcggggggtcggag

SEQ ID NO: 136 - DNA, 20 bp, Artificial
  20-mer unique DNA sequence
atgtgggccgggctgaacgc

SEQ ID NO: 137 - DNA, 20 bp, Artificial
  20-mer unique DNA sequence
actccccacactccgcccta

SEQ ID NO: 138 - DNA, 20 bp, Artificial
  20-mer unique DNA sequence
tgggatggaaattgcagggc

SEQ ID NO: 139 - DNA, 20 bp, Artificial
  20-mer unique DNA sequence
tattgcgggccttgcggtgt

SEQ ID NO: 140 - DNA, 20 bp, Artificial
  20-mer unique DNA sequence
tggaggcaggtaggggtgga

SEQ ID NO: 141 - DNA, 20 bp, Artificial
  20-mer unique DNA sequence
acttgttgttggcagcgcgg

SEQ ID NO: 142 - DNA, 20 bp, Artificial
  20-mer unique DNA sequence
tccggatctgtgcagccagt

SEQ ID NO: 143 - DNA, 20 bp, Artificial
  20-mer unique DNA sequence
tggctagagtacgccggaac

SEQ ID NO: 144 - DNA, 20 bp, Artificial
  20-mer unique DNA sequence
tctaccgccacgctccccat

SEQ ID NO: 145 - DNA, 20 bp, Artificial
  20-mer unique DNA sequence
gccgcctcttgactcgcttg

SEQ ID NO: 146 - DNA, 20 bp, Artificial
  20-mer unique DNA sequence
gggggggatgccgcttaaga

SEQ ID NO: 147 - DNA, 20 bp, Artificial
  20-mer unique DNA sequence
ccgcgggttcttctggcttg

SEQ ID NO: 148 - DNA, 20 bp, Artificial
  20-mer unique DNA sequence
gggctagcgtttggggatcg

SEQ ID NO: 149 - DNA, 20 bp, Artificial
  20-mer unique DNA sequence
cgacataccacgcgcaatcc

SEQ ID NO: 150 - DNA, 20 bp, Artificial
  20-mer unique DNA sequence
tttttctatcacgccgcccc

SEQ ID NO: 151 - DNA, 20 bp, Artificial
  20-mer unique DNA sequence
cagcaacatttcacgcccgc

SEQ ID NO: 152 - DNA, 20 bp, Artificial
  20-mer unique DNA sequence
tgacacgcttagtccgcgcc

SEQ ID NO: 153 - DNA, 20 bp, Artificial
  20-mer unique DNA sequence
atccgcgtaaggcgtcaccc

SEQ ID NO: 154 - DNA, 20 bp, Artificial
  20-mer unique DNA sequence
tcgcattgttgccctccctt

SEQ ID NO: 155 - DNA, 20 bp, Artificial
  20-mer unique DNA sequence
acaaaggtggcgaacggggc

SEQ ID NO: 156 - DNA, 20 bp, Artificial
  20-mer unique DNA sequence
ttgggcgtttgggcggtacg

SEQ ID NO: 157 - DNA, 20 bp, Artificial
  20-mer unique DNA sequence
gggcgcagtcggaaataacc

SEQ ID NO: 158 - DNA, 20 bp, Artificial
  20-mer unique DNA sequence
tcgggcgtgcggacaaagag

SEQ ID NO: 159 - DNA, 20 bp, Artificial
  20-mer unique DNA sequence
cccccccgtaccgctgaaaa

SEQ ID NO: 160 - DNA, 20 bp, Artificial
  20-mer unique DNA sequence
tcgacagcaggacagcacgg

SEQ ID NO: 161 - DNA, 20 bp, Artificial
  20-mer unique DNA sequence
cgctttgccgaggttttggg

SEQ ID NO: 162 - DNA, 20 bp, Artificial
  20-mer unique DNA sequence
tcacgactaccccgccaatg

SEQ ID NO: 163 - DNA, 20 bp, Artificial
  20-mer unique DNA sequence
atacactccgcccccctcgt

SEQ ID NO: 164 - DNA, 20 bp, Artificial
  20-mer unique DNA sequence
tctcccccatacccccgcaa

SEQ ID NO: 165 - DNA, 20 bp, Artificial
  20-mer unique DNA sequence
catcgggggatacgcttagg

SEQ ID NO: 166 - DNA, 20 bp, Artificial
  20-mer unique DNA sequence
tgtaactcggtcgcgctggc

SEQ ID NO: 167 - DNA, 20 bp, Artificial
  20-mer unique DNA sequence
ttgtgcggcgtgttcgtgat

SEQ ID NO: 168 - DNA, 20 bp, Artificial
  20-mer unique DNA sequence
tgggtgatatggcgtccgat

SEQ ID NO: 169 - DNA, 20 bp, Artificial
  20-mer unique DNA sequence
ccaggcacgcgcaattatga

SEQ ID NO: 170 - DNA, 20 bp, Artificial
  20-mer unique DNA sequence
ttattcccctgagcgccacc

SEQ ID NO: 171 - DNA, 20 bp, Artificial
  20-mer unique DNA sequence
gaggaagggaaggcggggtc

SEQ ID NO: 172 - DNA, 20 bp, Artificial
  20-mer unique DNA sequence
tagaagcatgaccaccgcgc

SEQ ID NO: 173 - DNA, 20 bp, Artificial
  20-mer unique DNA sequence
tcctaatcccctcacgctct

SEQ ID NO: 174 - DNA, 20 bp, Artificial
  20-mer unique DNA sequence
ctccctcatccccagccacg

SEQ ID NO: 175 - DNA, 20 bp, Artificial
  20-mer unique DNA sequence
tggaaaagccgagggacgcc

SEQ ID NO: 176 - DNA, 20 bp, Artificial
  20-mer unique DNA sequence
tgggttgcgcctggtatgcc

SEQ ID NO: 177 - DNA, 20 bp, Artificial
  20-mer unique DNA sequence
gggggacgcttattggcaag

SEQ ID NO: 178 - DNA, 20 bp, Artificial
  20-mer unique DNA sequence
actcccgccttcgccacttg

SEQ ID NO: 179 - DNA, 20 bp, Artificial
  20-mer unique DNA sequence
caataggcacccgcagacgc

SEQ ID NO: 180 - DNA, 20 bp, Artificial
  20-mer unique DNA sequence
ggtgtccaagggcgcaagtg

SEQ ID NO: 181 - DNA, 20 bp, Artificial
  20-mer unique DNA sequence
ttccccgcacaccaggctac

SEQ ID NO: 182 - DNA, 20 bp, Artificial
  20-mer unique DNA sequence
aattgtcccgcccagcctct

SEQ ID NO: 183 - DNA, 20 bp, Artificial
  20-mer unique DNA sequence
tcggccaacggataaacgca

SEQ ID NO: 184 - DNA, 20 bp, Artificial
  20-mer unique DNA sequence
aggaagccaagcccgcgtac

SEQ ID NO: 185 - DNA, 20 bp, Artificial
  20-mer unique DNA sequence
gtacgcttaatctctcgccc

SEQ ID NO: 186 - DNA, 20 bp, Artificial
  20-mer unique DNA sequence
gtcgtactcggcctttgcgc

SEQ ID NO: 187 - DNA, 20 bp, Artificial
  20-mer unique DNA sequence
aaaggcgggcggtgaaaaga

SEQ ID NO: 188 - DNA, 20 bp, Artificial
  20-mer unique DNA sequence
attgcgacgggacggaggta

SEQ ID NO: 189 - DNA, 20 bp, Artificial
  20-mer unique DNA sequence
tcgcgccgggtgaataagct

SEQ ID NO: 190 - DNA, 20 bp, Artificial
  20-mer unique DNA sequence
gctgcgggctgtgtttgtca

SEQ ID NO: 191 - DNA, 20 bp, Artificial
  20-mer unique DNA sequence
gtacacgcttcaccatcgca

SEQ ID NO: 192 - DNA, 20 bp, Artificial
  20-mer unique DNA sequence
ccgcccctgcttaccttcca

SEQ ID NO: 193 - DNA, 20 bp, Artificial
  20-mer unique DNA sequence
gggtcatagcgatcggcggt

SEQ ID NO: 194 - DNA, 20 bp, Artificial
  20-mer unique DNA sequence
ggactaagcggggcggattt

SEQ ID NO: 195 - DNA, 20 bp, Artificial
  20-mer unique DNA sequence
gtccgttgcttgtgggtgcg

SEQ ID NO: 196 - DNA, 20 bp, Artificial
  20-mer unique DNA sequence
actcttcgttcgctgccccc

SEQ ID NO: 197 - DNA, 20 bp, Artificial
  20-mer unique DNA sequence
aagggtggaaacggtgggga

SEQ ID NO: 198 - DNA, 20 bp, Artificial
  20-mer unique DNA sequence
cctcggacccctaaccccct

SEQ ID NO: 199 - DNA, 20 bp, Artificial
  20-mer unique DNA sequence
gagggaacgccggtgaggat

SEQ ID NO: 200 - DNA, 20 bp, Artificial
  20-mer unique DNA sequence
gcgggaacttggtggggtga

SEQ ID NO: 201 - DNA, 20 bp, Artificial
  20-mer unique DNA sequence
cgcggaggggaacagccatt

SEQ ID NO: 202 - DNA, 20 bp, Artificial
  20-mer unique DNA sequence
gaccctcggaacctgctcgc

SEQ ID NO: 203 - DNA, 20 bp, Artificial
  20-mer unique DNA sequence
accgaggcgtcattcccagc

SEQ ID NO: 204 - DNA, 20 bp, Artificial
  20-mer unique DNA sequence
ataagcatcgagcgggcgga

SEQ ID NO: 205 - DNA, 20 bp, Artificial
  20-mer unique DNA sequence
ccgaccattccccttcagcc

SEQ ID NO: 206 - DNA, 20 bp, Artificial
  20-mer unique DNA sequence
acgggtaacacttgcgggag

SEQ ID NO: 207 - DNA, 20 bp, Artificial
  20-mer unique DNA sequence
tctggtcggtccttggctca

SEQ ID NO: 208 - DNA, 20 bp, Artificial
  20-mer unique DNA sequence
aacccccacaactagccgcc

SEQ ID NO: 209 - DNA, 20 bp, Artificial
  20-mer unique DNA sequence
cgttgcctgcagtgctctct

SEQ ID NO: 210 - DNA, 20 bp, Artificial
  20-mer unique DNA sequence
actgggctaggacggtctga

SEQ ID NO: 211 - DNA, 20 bp, Artificial
  20-mer unique DNA sequence
agccacggtgtgaccgctaa

SEQ ID NO: 212 - DNA, 20 bp, Artificial
  20-mer unique DNA sequence
gccggccattattccctctg

SEQ ID NO: 213 - DNA, 20 bp, Artificial
  20-mer unique DNA sequence
gcagtccccctctctcccct

SEQ ID NO: 214 - DNA, 20 bp, Artificial
  20-mer unique DNA sequence
atcacgcactatgcgctggg

SEQ ID NO: 215 - DNA, 20 bp, Artificial
  20-mer unique DNA sequence
gaggtcagagccgatgcgta

SEQ ID NO: 216 - DNA, 20 bp, Artificial
  20-mer unique DNA sequence
agggttggctgcgagtggtc

SEQ ID NO: 217 - DNA, 20 bp, Artificial
  20-mer unique DNA sequence
agagtgtttccccccccggc

SEQ ID NO: 218 - DNA, 20 bp, Artificial
  20-mer unique DNA sequence
tggttatgttgccggggtgc

SEQ ID NO: 219 - DNA, 20 bp, Artificial
  20-mer unique DNA sequence
ggggctcagtcaaggcgtct

SEQ ID NO: 220 - DNA, 20 bp, Artificial
  20-mer unique DNA sequence
agatcggaatggagcggggc

SEQ ID NO: 221 - DNA, 20 bp, Artificial
  20-mer unique DNA sequence
aacgcgccaacgaggaaccc

SEQ ID NO: 222 - DNA, 20 bp, Artificial
  20-mer unique DNA sequence
ccggtctggggaatttggca

SEQ ID NO: 223 - DNA, 20 bp, Artificial
  20-mer unique DNA sequence
ctgcggaaactgggctgggt

SEQ ID NO: 224 - DNA, 20 bp, Artificial
  20-mer unique DNA sequence
ctcacaaacccccccaatcg

SEQ ID NO: 225 - DNA, 20 bp, Artificial
  20-mer unique DNA sequence
gatctactgccgcttcccgc

SEQ ID NO: 226 - DNA, 20 bp, Artificial
  20-mer unique DNA sequence
tggaagtacaggcgcaggat

SEQ ID NO: 227 - DNA, 20 bp, Artificial
  20-mer unique DNA sequence
ccggcgcgtgtgtagttgga

SEQ ID NO: 228 - DNA, 20 bp, Artificial
  20-mer unique DNA sequence
aacctgccttccgcccctaa

SEQ ID NO: 229 - DNA, 20 bp, Artificial
  20-mer unique DNA sequence
tctttgtctgctttcccgca

SEQ ID NO: 230 - DNA, 20 bp, Artificial
  20-mer unique DNA sequence
tcgggtggcggttcgtaggt

SEQ ID NO: 231 - DNA, 20 bp, Artificial
  20-mer unique DNA sequence
cagaatccaccacggcctcg

SEQ ID NO: 232 - DNA, 20 bp, Artificial
  20-mer unique DNA sequence
cggctggcgtgcgaactgat

SEQ ID NO: 233 - DNA, 20 bp, Artificial
  20-mer unique DNA sequence
cccgctcgtcgctttgcaac

SEQ ID NO: 234 - DNA, 20 bp, Artificial
  20-mer unique DNA sequence
tagtccggcgcaaacgtggg

SEQ ID NO: 235 - DNA, 20 bp, Artificial
  20-mer unique DNA sequence
cggggatgttcgtaggcaag

SEQ ID NO: 236 - DNA, 20 bp, Artificial
  20-mer unique DNA sequence
ggaaggggctttgcgtgggt

SEQ ID NO: 237 - DNA, 20 bp, Artificial
  20-mer unique DNA sequence
gattggggtgcgcttgaaca

SEQ ID NO: 238 - DNA, 20 bp, Artificial
  20-mer unique DNA sequence
tgcttagctcctggctacgg

SEQ ID NO: 239 - DNA, 20 bp, Artificial
  20-mer unique DNA sequence
ctgtccaccccttcaccccc

SEQ ID NO: 240 - DNA, 20 bp, Artificial
  20-mer unique DNA sequence
caccgccccccactagaagg

SEQ ID NO: 241 - DNA, 20 bp, Artificial
  20-mer unique DNA sequence
ctgggcggctgaaggtgagt

SEQ ID NO: 242 - DNA, 20 bp, Artificial
  20-mer unique DNA sequence
gaacagccaacggtcacgcc

SEQ ID NO: 243 - DNA, 20 bp, Artificial
  20-mer unique DNA sequence
atcgtctgtgcctgctcccg

SEQ ID NO: 244 - DNA, 20 bp, Artificial
  20-mer unique DNA sequence
ggacgggtcgaacaacgtga

SEQ ID NO: 245 - DNA, 20 bp, Artificial
  20-mer unique DNA sequence
aactactggcgcctctgtgc

SEQ ID NO: 246 - DNA, 20 bp, Artificial
  20-mer unique DNA sequence
tcgtagccgttgggggtgtt

SEQ ID NO: 247 - DNA, 20 bp, Artificial
  20-mer unique DNA sequence
cgtccgccccctgaactctt

SEQ ID NO: 248 - DNA, 20 bp, Artificial
  20-mer unique DNA sequence
ctccggcctcagctttctcg

SEQ ID NO: 249 - DNA, 20 bp, Artificial
  20-mer unique DNA sequence
caaaccaaccctgcgaccaa

SEQ ID NO: 250 - DNA, 20 bp, Artificial
  20-mer unique DNA sequence
cctttccccggtgttcccct

SEQ ID NO: 251 - DNA, 20 bp, Artificial
  20-mer unique DNA sequence
agattgcaacccgaaggcgc

SEQ ID NO: 252 - DNA, 20 bp, Artificial
  20-mer unique DNA sequence
attcgcaacgcagctaccca

SEQ ID NO: 253 - DNA, 20 bp, Artificial
  20-mer unique DNA sequence
gatcttcacagggggccgca

SEQ ID NO: 254 - DNA, 20 bp, Artificial
  20-mer unique DNA sequence
gtccacccggcttctccatc

SEQ ID NO: 255 - DNA, 20 bp, Artificial
  20-mer unique DNA sequence
tcagctcccccgtcccttta

SEQ ID NO: 256 - DNA, 20 bp, Artificial
  20-mer unique DNA sequence
agcacgcgagggaggacaag

SEQ ID NO: 257 - DNA, 20 bp, Artificial
  20-mer unique DNA sequence
gtgtaaccatggggagcgcc

SEQ ID NO: 258 - DNA, 20 bp, Artificial
  20-mer unique DNA sequence
tctaccccccgcgcatctta

SEQ ID NO: 259 - DNA, 20 bp, Artificial
  20-mer unique DNA sequence
ttaatggggcaagtggcggt

SEQ ID NO: 260 - DNA, 20 bp, Artificial
  20-mer unique DNA sequence
aagaccacccccccaggacc

SEQ ID NO: 261 - DNA, 20 bp, Artificial
  20-mer unique DNA sequence
tccctcctgtaactcccgcc

SEQ ID NO: 262 - DNA, 20 bp, Artificial
  20-mer unique DNA sequence
taagcaaaacgcccaccggt

SEQ ID NO: 263 - DNA, 20 bp, Artificial
  20-mer unique DNA sequence
gaaggcccgtaaccccgaac

SEQ ID NO: 264 - DNA, 20 bp, Artificial
  20-mer unique DNA sequence
caaccccacacagccccacg

SEQ ID NO: 265 - DNA, 20 bp, Artificial
  20-mer unique DNA sequence
tgggacggctgttgagggaa

SEQ ID NO: 266 - DNA, 20 bp, Artificial
  20-mer unique DNA sequence
aaagctgctacgcccgaccc

SEQ ID NO: 267 - DNA, 20 bp, Artificial
  20-mer unique DNA sequence
accagcgcccagatgaaagg

SEQ ID NO: 268 - DNA, 20 bp, Artificial
  20-mer unique DNA sequence
gcgaggagcggatgagagga

SEQ ID NO: 269 - DNA, 20 bp, Artificial
  20-mer unique DNA sequence
gggggttcggccttgtagct

SEQ ID NO: 270 - DNA, 20 bp, Artificial
  20-mer unique DNA sequence
tccgccgtgcctgctaagta

SEQ ID NO: 271 - DNA, 20 bp, Artificial
  20-mer unique DNA sequence
aagactgagggagacgcggc

SEQ ID NO: 272 - DNA, 20 bp, Artificial
  20-mer unique DNA sequence
tggagtggcggcgtgtacct

SEQ ID NO: 273 - DNA, 20 bp, Artificial
  20-mer unique DNA sequence
tggggcgccgtgtattaggt

SEQ ID NO: 274 - DNA, 20 bp, Artificial
  20-mer unique DNA sequence
ttgtagcagtcgatgccggc

SEQ ID NO: 275 - DNA, 20 bp, Artificial
  20-mer unique DNA sequence
ccgagggtcgtggttgggat

SEQ ID NO: 276 - DNA, 20 bp, Artificial
  20-mer unique DNA sequence
ttaggagccgaccaatgggc

SEQ ID NO: 277 - DNA, 20 bp, Artificial
  20-mer unique DNA sequence
gggggtactcggtcgctttg

SEQ ID NO: 278 - DNA, 20 bp, Artificial
  20-mer unique DNA sequence
tcacggtgggacgggttagc

SEQ ID NO: 279 - DNA, 20 bp, Artificial
  20-mer unique DNA sequence
atcgggcggggcaattagag

SEQ ID NO: 280 - DNA, 20 bp, Artificial
  20-mer unique DNA sequence
catatgggaagggcgcgtgc

SEQ ID NO: 281 - DNA, 20 bp, Artificial
  20-mer unique DNA sequence
tcacgttgcgggttttcggc

SEQ ID NO: 282 - DNA, 20 bp, Artificial
  20-mer unique DNA sequence
tggctattcgaggctggggt

SEQ ID NO: 283 - DNA, 20 bp, Artificial
  20-mer unique DNA sequence
atggcagagcgggcagggta

SEQ ID NO: 284 - DNA, 20 bp, Artificial
  20-mer unique DNA sequence
caggtggtgcgacgagggtg

SEQ ID NO: 285 - DNA, 20 bp, Artificial
  20-mer unique DNA sequence
accccaccgcacctgtctcc

SEQ ID NO: 286 - DNA, 20 bp, Artificial
  20-mer unique DNA sequence
ctgcggtcgggatttaaggc

SEQ ID NO: 287 - DNA, 20 bp, Artificial
  20-mer unique DNA sequence
tgaaggtgttagcgggcggc

SEQ ID NO: 288 - DNA, 20 bp, Artificial
  20-mer unique DNA sequence
ctttggggcttgcggactca

SEQ ID NO: 289 - DNA, 20 bp, Artificial
  20-mer unique DNA sequence
cgcccccgaaggtaactgcc

SEQ ID NO: 290 - DNA, 20 bp, Artificial
  20-mer unique DNA sequence
gtaagggcgcggtgatcgtg

SEQ ID NO: 291 - DNA, 20 bp, Artificial
  20-mer unique DNA sequence
tttccacgttccgccttttg

SEQ ID NO: 292 - DNA, 20 bp, Artificial
  20-mer unique DNA sequence
ttcgccgctccctcgtgtgt

SEQ ID NO: 293 - DNA, 20 bp, Artificial
  20-mer unique DNA sequence
gttgaaatgcggggaggagg

SEQ ID NO: 294 - DNA, 20 bp, Artificial
  20-mer unique DNA sequence
acgtgcgtgacataggggtg

SEQ ID NO: 295 - DNA, 20 bp, Artificial
  20-mer unique DNA sequence
tcgtggctccctagtaccca

SEQ ID NO: 296 - DNA, 20 bp, Artificial
  20-mer unique DNA sequence
gattgcggggggtttagtgg

SEQ ID NO: 297 - DNA, 20 bp, Artificial
  20-mer unique DNA sequence
ccctcgttctcccatctccg

SEQ ID NO: 298 - DNA, 20 bp, Artificial
  20-mer unique DNA sequence
ccatgagcacgttttcgcga

SEQ ID NO: 299 - DNA, 20 bp, Artificial
  20-mer unique DNA sequence
gctgttttgtggccatccga

SEQ ID NO: 300 - DNA, 20 bp, Artificial
  20-mer unique DNA sequence
aatcacagaatgggggccgt

SEQ ID NO: 301 - DNA, 20 bp, Artificial
  20-mer unique DNA sequence
tgcaccctcgcccagaatcc

SEQ ID NO: 302 - DNA, 20 bp, Artificial
  20-mer unique DNA sequence
aagacgcactaagccggggg

SEQ ID NO: 303 - DNA, 20 bp, Artificial
  20-mer unique DNA sequence
gagacaagaccggcaacgcc

SEQ ID NO: 304 - DNA, 20 bp, Artificial
  20-mer unique DNA sequence
gttgccgtggggtcgggtta

SEQ ID NO: 305 - DNA, 20 bp, Artificial
  20-mer unique DNA sequence
tgtcgctgttccccgtccag

SEQ ID NO: 306 - DNA, 20 bp, Artificial
  20-mer unique DNA sequence
gctggaaatgttggggctgc

SEQ ID NO: 307 - DNA, 20 bp, Artificial
  20-mer unique DNA sequence
ctctgtgtccccttcgccgc

SEQ ID NO: 308 - DNA, 20 bp, Artificial
  20-mer unique DNA sequence
cccgcccaatgcaatcgttt

SEQ ID NO: 309 - DNA, 20 bp, Artificial
  20-mer unique DNA sequence
aagcgcccaaaactgccccg

SEQ ID NO: 310 - DNA, 20 bp, Artificial
  20-mer unique DNA sequence
cagctgtcggttaaattgcg

SEQ ID NO: 311 - DNA, 20 bp, Artificial
  20-mer unique DNA sequence
atgcccacttcccggttcgt

SEQ ID NO: 312 - DNA, 20 bp, Artificial
  20-mer unique DNA sequence
acaattgcgcctcctcgtgc

SEQ ID NO: 313 - DNA, 20 bp, Artificial
  20-mer unique DNA sequence
tcgcctctgctcacgtctcg

SEQ ID NO: 314 - DNA, 20 bp, Artificial
  20-mer unique DNA sequence
gggaaatcagcaaagccggc

SEQ ID NO: 315 - DNA, 20 bp, Artificial
  20-mer unique DNA sequence
catctcaccaccgcgcaaat

SEQ ID NO: 316 - DNA, 20 bp, Artificial
  20-mer unique DNA sequence
caggcgggggtggaaaatcg

SEQ ID NO: 317 - DNA, 20 bp, Artificial
  20-mer unique DNA sequence
ctttcgaaccccaaaacccg

SEQ ID NO: 318 - DNA, 20 bp, Artificial
  20-mer unique DNA sequence
tccgcgggaaaaacagaacg

SEQ ID NO: 319 - DNA, 20 bp, Artificial
  20-mer unique DNA sequence
atccctccagtgccagtcgc

SEQ ID NO: 320 - DNA, 20 bp, Artificial
  20-mer unique DNA sequence
tctgttttgccggtggggag

SEQ ID NO: 321 - DNA, 20 bp, Artificial
  20-mer unique DNA sequence
caattccacgcctcccgatg

SEQ ID NO: 322 - DNA, 20 bp, Artificial
  20-mer unique DNA sequence
ttttgtgttcggtggcgtcc

SEQ ID NO: 323 - DNA, 20 bp, Artificial
  20-mer unique DNA sequence
gttgacggcgtacctccaca

SEQ ID NO: 324 - DNA, 20 bp, Artificial
  20-mer unique DNA sequence
gtgagggcgggtgatttgct

SEQ ID NO: 325 - DNA, 20 bp, Artificial
  20-mer unique DNA sequence
cgagatttttgacccccgcc

SEQ ID NO: 326 - DNA, 20 bp, Artificial
  20-mer unique DNA sequence
gactgaccgcaccccttgca

SEQ ID NO: 327 - DNA, 20 bp, Artificial
  20-mer unique DNA sequence
acgttattacctccgcggcg

SEQ ID NO: 328 - DNA, 20 bp, Artificial
  20-mer unique DNA sequence
atgcggacgtacggaagggg

SEQ ID NO: 329 - DNA, 20 bp, Artificial
  20-mer unique DNA sequence
agccgggtatgcgattttgg

SEQ ID NO: 330 - DNA, 20 bp, Artificial
  20-mer unique DNA sequence
aagcgtttagcgatgcccga

SEQ ID NO: 331 - DNA, 20 bp, Artificial
  20-mer unique DNA sequence
ccgacatacacccccgcacc

SEQ ID NO: 332 - DNA, 20 bp, Artificial
  20-mer unique DNA sequence
ggggctgggagaggaacaca

SEQ ID NO: 333 - DNA, 20 bp, Artificial
  20-mer unique DNA sequence
accatcggcacccaaagacc

SEQ ID NO: 334 - DNA, 20 bp, Artificial
  20-mer unique DNA sequence
ccggagaggatttgcagccc

SEQ ID NO: 335 - DNA, 20 bp, Artificial
  20-mer unique DNA sequence
cgccagccgagggagaaata

SEQ ID NO: 336 - DNA, 20 bp, Artificial
  20-mer unique DNA sequence
ttatacgggggctgacggga

SEQ ID NO: 337 - DNA, 20 bp, Artificial
  20-mer unique DNA sequence
tgccacagagccgacaaagc

SEQ ID NO: 338 - DNA, 20 bp, Artificial
  20-mer unique DNA sequence
cgcgaccgaagggacacaaa

SEQ ID NO: 339 - DNA, 20 bp, Artificial
  20-mer unique DNA sequence
tgggtttggagggggggttc

SEQ ID NO: 340 - DNA, 20 bp, Artificial
  20-mer unique DNA sequence
tcttggagcggttcgggtcg

SEQ ID NO: 341 - DNA, 20 bp, Artificial
  20-mer unique DNA sequence
cggacacctccccaagaagg

SEQ ID NO: 342 - DNA, 20 bp, Artificial
  20-mer unique DNA sequence
ccggggccttatatgggcga

SEQ ID NO: 343 - DNA, 20 bp, Artificial
  20-mer unique DNA sequence
ttcttcgaccgccaattccg

SEQ ID NO: 344 - DNA, 20 bp, Artificial
  20-mer unique DNA sequence
tatcgacccacccccccttg

SEQ ID NO: 345 - DNA, 20 bp, Artificial
  20-mer unique DNA sequence
tccctactcccaagcgccgg

SEQ ID NO: 346 - DNA, 20 bp, Artificial
  20-mer unique DNA sequence
agaggggtctgctgtggcgt

SEQ ID NO: 347 - DNA, 20 bp, Artificial
  20-mer unique DNA sequence
atcagttttggggacgcgcg

SEQ ID NO: 348 - DNA, 20 bp, Artificial
  20-mer unique DNA sequence
aggtgcgctcggggtcttga

SEQ ID NO: 349 - DNA, 20 bp, Artificial
  20-mer unique DNA sequence
tgcaaagaccggcccactcg

SEQ ID NO: 350 - DNA, 20 bp, Artificial
  20-mer unique DNA sequence
catactaaggctcggcgcgg

SEQ ID NO: 351 - DNA, 20 bp, Artificial
  20-mer unique DNA sequence
ccgtcgtgctttgtgcccat

SEQ ID NO: 352 - DNA, 20 bp, Artificial
  20-mer unique DNA sequence
cccggggacttacctttgcc

SEQ ID NO: 353 - DNA, 20 bp, Artificial
  20-mer unique DNA sequence
caccccagcgagctaaccca

SEQ ID NO: 354 - DNA, 20 bp, Artificial
  20-mer unique DNA sequence
agagggtggttggcaggggc

SEQ ID NO: 355 - DNA, 20 bp, Artificial
  20-mer unique DNA sequence
cgcagtcggtaggagaggcc

SEQ ID NO: 356 - DNA, 20 bp, Artificial
  20-mer unique DNA sequence
ctgtaacgaactgggcggca

SEQ ID NO: 357 - DNA, 20 bp, Artificial
  20-mer unique DNA sequence
tgcgaacccgaaaaaacacg

SEQ ID NO: 358 - DNA, 20 bp, Artificial
  20-mer unique DNA sequence
tcatggagggaacggcacaa

SEQ ID NO: 359 - DNA, 20 bp, Artificial
  20-mer unique DNA sequence
tcaagccatgcccgaacaag

SEQ ID NO: 360 - DNA, 20 bp, Artificial
  20-mer unique DNA sequence
cttcctaccctgccacccga

SEQ ID NO: 361 - DNA, 20 bp, Artificial
  20-mer unique DNA sequence
caccctcaacgcatccccct

SEQ ID NO: 362 - DNA, 20 bp, Artificial
  20-mer unique DNA sequence
tcgggtggggttgtttttgc

SEQ ID NO: 363 - DNA, 20 bp, Artificial
  20-mer unique DNA sequence
gcgtttgcatgactccctcg

SEQ ID NO: 364 - DNA, 20 bp, Artificial
  20-mer unique DNA sequence
cgataaaccaacgcagcccc

SEQ ID NO: 365 - DNA, 20 bp, Artificial
  20-mer unique DNA sequence
tgccccgatacccatctccg

SEQ ID NO: 366 - DNA, 20 bp, Artificial
  20-mer unique DNA sequence
tgcccttcgtctgccttcgc

SEQ ID NO: 367 - DNA, 20 bp, Artificial
  20-mer unique DNA sequence
atcctccattcccgctgtcg

SEQ ID NO: 368 - DNA, 20 bp, Artificial
  20-mer unique DNA sequence
ggtcagggaacaggcagcgc

SEQ ID NO: 369 - DNA, 20 bp, Artificial
  20-mer unique DNA sequence
cgggcagttgtgggcttggt

SEQ ID NO: 370 - DNA, 20 bp, Artificial
  20-mer unique DNA sequence
aggaaggtggacagggccgg

SEQ ID NO: 371 - DNA, 20 bp, Artificial
  20-mer unique DNA sequence
acgacagcagacgggggatt

SEQ ID NO: 372 - DNA, 20 bp, Artificial
  20-mer unique DNA sequence
acatagaccgctcccccgcc

SEQ ID NO: 373 - DNA, 20 bp, Artificial
  20-mer unique DNA sequence
ttggtgccgtgctgggttac

SEQ ID NO: 374 - DNA, 20 bp, Artificial
  20-mer unique DNA sequence
cacaaaaggggtcagcggga

SEQ ID NO: 375 - DNA, 20 bp, Artificial
  20-mer unique DNA sequence
agaccccgcccttattgcag

SEQ ID NO: 376 - DNA, 20 bp, Artificial
  20-mer unique DNA sequence
aatgcccgctgaccgctgtc

SEQ ID NO: 377 - DNA, 20 bp, Artificial
  20-mer unique DNA sequence
aagggggtgttggggaggca

SEQ ID NO: 378 - DNA, 20 bp, Artificial
  20-mer unique DNA sequence
gggtggcaaagtggtcgggt

SEQ ID NO: 379 - DNA, 20 bp, Artificial
  20-mer unique DNA sequence
tggtaagaacaagaggccgc

SEQ ID NO: 380 - DNA, 20 bp, Artificial
  20-mer unique DNA sequence
tgcccccacccatcttcaac

SEQ ID NO: 381 - DNA, 20 bp, Artificial
  20-mer unique DNA sequence
aggttcaggtagcgcgtcgg

SEQ ID NO: 382 - DNA, 20 bp, Artificial
  20-mer unique DNA sequence
atgccgcgtggtttaggtcg

SEQ ID NO: 383 - DNA, 20 bp, Artificial
  20-mer unique DNA sequence
ggcgccctctatccaccgta

SEQ ID NO: 384 - DNA, 20 bp, Artificial
  20-mer unique DNA sequence
taagcggtcagagtgggcga

SEQ ID NO: 385 - DNA, 20 bp, Artificial
  20-mer unique DNA sequence
tgagcagggctaacgtcgga

SEQ ID NO: 386 - DNA, 20 bp, Artificial
  20-mer unique DNA sequence
cgaaacgggaacgagcacaa

SEQ ID NO: 387 - DNA, 20 bp, Artificial
  20-mer unique DNA sequence
tgaacacgccggggacaaac

SEQ ID NO: 388 - DNA, 20 bp, Artificial
  20-mer unique DNA sequence
tcatccaccaaacgcatccg

SEQ ID NO: 389 - DNA, 20 bp, Artificial
  20-mer unique DNA sequence
ttgtagcaggcgccgggatt

SEQ ID NO: 390 - DNA, 20 bp, Artificial
  20-mer unique DNA sequence
gtttcgcaggccgttgtccc

SEQ ID NO: 391 - DNA, 20 bp, Artificial
  20-mer unique DNA sequence
cgtgcttaattcgggagggg

SEQ ID NO: 392 - DNA, 20 bp, Artificial
  20-mer unique DNA sequence
tagaaggccggagcgaggga

SEQ ID NO: 393 - DNA, 20 bp, Artificial
  20-mer unique DNA sequence
accccccacgacagcctacg

SEQ ID NO: 394 - DNA, 20 bp, Artificial
  20-mer unique DNA sequence
gactccggccttccattgca

SEQ ID NO: 395 - DNA, 20 bp, Artificial
  20-mer unique DNA sequence
ggcttcgtcgggttggctac

SEQ ID NO: 396 - DNA, 20 bp, Artificial
  20-mer unique DNA sequence
ctcggtcgttgataggggcg

SEQ ID NO: 397 - DNA, 20 bp, Artificial
  20-mer unique DNA sequence
tgagaacgcgcgggaccact

SEQ ID NO: 398 - DNA, 20 bp, Artificial
  20-mer unique DNA sequence
ttatcaggctccacacggcg

SEQ ID NO: 399 - DNA, 20 bp, Artificial
  20-mer unique DNA sequence
ttgcggttgagcgtttgtgg

SEQ ID NO: 400 - DNA, 20 bp, Artificial
  20-mer unique DNA sequence
tcgggaggcaatgagcggtt

SEQ ID NO: 401 - DNA, 20 bp, Artificial
  20-mer unique DNA sequence
acccccattcccgaccacaa

SEQ ID NO: 402 - DNA, 20 bp, Artificial
  20-mer unique DNA sequence
ttggccgcgggtagtaaggt

SEQ ID NO: 403 - DNA, 20 bp, Artificial
  20-mer unique DNA sequence
cttaaggggtgattggccgc

SEQ ID NO: 404 - DNA, 20 bp, Artificial
  20-mer unique DNA sequence
aagcgcacgtagagtggtca

SEQ ID NO: 405 - DNA, 20 bp, Artificial
  20-mer unique DNA sequence
atgagcccgtgcgaatcagg

SEQ ID NO: 406 - DNA, 20 bp, Artificial
  20-mer unique DNA sequence
cgtggggcatgctagcttaa

SEQ ID NO: 407 - DNA, 20 bp, Artificial
  20-mer unique DNA sequence
ggccccctccccattcgatg

SEQ ID NO: 408 - DNA, 20 bp, Artificial
  20-mer unique DNA sequence
tccctgatccgcgtagcatg

SEQ ID NO: 409 - DNA, 20 bp, Artificial
  20-mer unique DNA sequence
cgggagtcttggcgcaattg

SEQ ID NO: 410 - DNA, 20 bp, Artificial
  20-mer unique DNA sequence
aagcagggaggaggccaagc

SEQ ID NO: 411 - DNA, 20 bp, Artificial
  20-mer unique DNA sequence
atgctattggtcgggctggg

SEQ ID NO: 412 - DNA, 20 bp, Artificial
  20-mer unique DNA sequence
ctggtcgtggttggggtgca

SEQ ID NO: 413 - DNA, 20 bp, Artificial
  20-mer unique DNA sequence
gcgcaggggaccgagatacg

SEQ ID NO: 414 - DNA, 20 bp, Artificial
  20-mer unique DNA sequence
atggacgaggtgcgagagac

SEQ ID NO: 415 - DNA, 20 bp, Artificial
  20-mer unique DNA sequence
tcgccccacccctcgttatc

SEQ ID NO: 416 - DNA, 20 bp, Artificial
  20-mer unique DNA sequence
acatgccgtcctccgcctcc

SEQ ID NO: 417 - DNA, 20 bp, Artificial
  20-mer unique DNA sequence
gcattaaccaggcgcgcagc

SEQ ID NO: 418 - DNA, 20 bp, Artificial
  20-mer unique DNA sequence
gggggaaaagtggggcttcg

SEQ ID NO: 419 - DNA, 20 bp, Artificial
  20-mer unique DNA sequence
cacaaggtccccccacggct

SEQ ID NO: 420 - DNA, 20 bp, Artificial
  20-mer unique DNA sequence
tccccccgtctcgtcatttc

SEQ ID NO: 421 - DNA, 20 bp, Artificial
  20-mer unique DNA sequence
cggcccaatcagcagcaaag

SEQ ID NO: 422 - DNA, 20 bp, Artificial
  20-mer unique DNA sequence
tgccgactcaggcggaaaac

SEQ ID NO: 423 - DNA, 20 bp, Artificial
  20-mer unique DNA sequence
ttaaccgggtcgcacactcg

SEQ ID NO: 424 - DNA, 20 bp, Artificial
  20-mer unique DNA sequence
tcgcgcggactcaaatggac

SEQ ID NO: 425 - DNA, 20 bp, Artificial
  20-mer unique DNA sequence
gccaacgccaatcccgaatc

SEQ ID NO: 426 - DNA, 20 bp, Artificial
  20-mer unique DNA sequence
agatgggggggctaaccgaa

SEQ ID NO: 427 - DNA, 20 bp, Artificial
  20-mer unique DNA sequence
taccgccctccttcaccgac

SEQ ID NO: 428 - DNA, 20 bp, Artificial
  20-mer unique DNA sequence
tcttgtggcgtttgcctcgg

SEQ ID NO: 429 - DNA, 20 bp, Artificial
  20-mer unique DNA sequence
cccaccatctcgttccctgg

SEQ ID NO: 430 - DNA, 20 bp, Artificial
  20-mer unique DNA sequence
tgcgagctagcctacgtcag

SEQ ID NO: 431 - DNA, 20 bp, Artificial
  20-mer unique DNA sequence
aacccgttgatctccggacc

SEQ ID NO: 432 - DNA, 20 bp, Artificial
  20-mer unique DNA sequence
tctgaggggatgcgtgacag

SEQ ID NO: 433 - DNA, 20 bp, Artificial
  20-mer unique DNA sequence
cgactttcagcccccgacat

SEQ ID NO: 434 - DNA, 20 bp, Artificial
  20-mer unique DNA sequence
ccgaagcgccaacccacagt

SEQ ID NO: 435 - DNA, 20 bp, Artificial
  20-mer unique DNA sequence
acattaggatccacggggcg

SEQ ID NO: 436 - DNA, 20 bp, Artificial
  20-mer unique DNA sequence
tttctttgcccgtgcgtcgt

SEQ ID NO: 437 - DNA, 20 bp, Artificial
  20-mer unique DNA sequence
atagtagcgcgcgcatgagt

SEQ ID NO: 438 - DNA, 20 bp, Artificial
  20-mer unique DNA sequence
cgtcaagcgaaaggccccac

SEQ ID NO: 439 - DNA, 20 bp, Artificial
  20-mer unique DNA sequence
ccgtgttaatgggcgccgac

SEQ ID NO: 440 - DNA, 20 bp, Artificial
  20-mer unique DNA sequence
cttggtgagcgcgatgtgtc

SEQ ID NO: 441 - DNA, 20 bp, Artificial
  20-mer unique DNA sequence
cagaccccgagtagcacgca

SEQ ID NO: 442 - DNA, 20 bp, Artificial
  20-mer unique DNA sequence
cacccgccttccgttgtcag

SEQ ID NO: 443 - DNA, 20 bp, Artificial
  20-mer unique DNA sequence
ttcgtcccctccgcttgttc

SEQ ID NO: 444 - DNA, 20 bp, Artificial
  20-mer unique DNA sequence
tgcgcccatgcctcgtagtc

SEQ ID NO: 445 - DNA, 20 bp, Artificial
  20-mer unique DNA sequence
cgcctactctttcgctgccc

SEQ ID NO: 446 - DNA, 20 bp, Artificial
  20-mer unique DNA sequence
gcgggttcgggattttaggg

SEQ ID NO: 447 - DNA, 20 bp, Artificial
  20-mer unique DNA sequence
tcgggttgctgtgaggggag

SEQ ID NO: 448 - DNA, 20 bp, Artificial
  20-mer unique DNA sequence
gacacgccctaacgcctccg

SEQ ID NO: 449 - DNA, 20 bp, Artificial
  20-mer unique DNA sequence
cggtcacggagaaagaggcg

SEQ ID NO: 450 - DNA, 20 bp, Artificial
  20-mer unique DNA sequence
ctgcacgcccatacgaaccg

SEQ ID NO: 451 - DNA, 20 bp, Artificial
  20-mer unique DNA sequence
ccgttgccttgctgtacccc

SEQ ID NO: 452 - DNA, 20 bp, Artificial
  20-mer unique DNA sequence
gcccccaacaggagcaggac

SEQ ID NO: 453 - DNA, 20 bp, Artificial
  20-mer unique DNA sequence
cttggcggtgctctgtgggg

SEQ ID NO: 454 - DNA, 20 bp, Artificial
  20-mer unique DNA sequence
gaccgcggttgtcccctttg

SEQ ID NO: 455 - DNA, 20 bp, Artificial
  20-mer unique DNA sequence
tctgggcaactggcggaagt

SEQ ID NO: 456 - DNA, 20 bp, Artificial
  20-mer unique DNA sequence
ccccgctttcatgcacgacc

SEQ ID NO: 457 - DNA, 20 bp, Artificial
  20-mer unique DNA sequence
tttcaacggcgaggacgaga

SEQ ID NO: 458 - DNA, 20 bp, Artificial
  20-mer unique DNA sequence
gttgtaggacggggctgggc

SEQ ID NO: 459 - DNA, 20 bp, Artificial
  20-mer unique DNA sequence
atacttggttgggcggggga

SEQ ID NO: 460 - DNA, 20 bp, Artificial
  20-mer unique DNA sequence
cgcccgaccttcatttacgc

SEQ ID NO: 461 - DNA, 20 bp, Artificial
  20-mer unique DNA sequence
ttcgcgccgcctgataacct

SEQ ID NO: 462 - DNA, 20 bp, Artificial
  20-mer unique DNA sequence
aaagtagttcctgcgcccgc

SEQ ID NO: 463 - DNA, 20 bp, Artificial
  20-mer unique DNA sequence
ccacccatgcatcgccactt

SEQ ID NO: 464 - DNA, 20 bp, Artificial
  20-mer unique DNA sequence
atcgggtgctgtcgctgtcg

SEQ ID NO: 465 - DNA, 20 bp, Artificial
  20-mer unique DNA sequence
tatggagggcgcacaggcaa

SEQ ID NO: 466 - DNA, 20 bp, Artificial
  20-mer unique DNA sequence
aaatgcggggtgtgggactc

SEQ ID NO: 467 - DNA, 20 bp, Artificial
  20-mer unique DNA sequence
gctacggtctggaggtcggg

SEQ ID NO: 468 - DNA, 20 bp, Artificial
  20-mer unique DNA sequence
aaacctacccctgtaccgcc

SEQ ID NO: 469 - DNA, 20 bp, Artificial
  20-mer unique DNA sequence
cttaagggagggcgcgagaa

SEQ ID NO: 470 - DNA, 20 bp, Artificial
  20-mer unique DNA sequence
ccccccacttccagcactcg

SEQ ID NO: 471 - DNA, 20 bp, Artificial
  20-mer unique DNA sequence
ttagtcgccagcccgtcctc

SEQ ID NO: 472 - DNA, 20 bp, Artificial
  20-mer unique DNA sequence
gcggccggggttagggagta

SEQ ID NO: 473 - DNA, 20 bp, Artificial
  20-mer unique DNA sequence
ggtgcgtccggttgctcttc

SEQ ID NO: 474 - DNA, 20 bp, Artificial
  20-mer unique DNA sequence
cgcaacaaacctgcacgcga

SEQ ID NO: 475 - DNA, 20 bp, Artificial
  20-mer unique DNA sequence
gtaccggccaagtcagcgct

SEQ ID NO: 476 - DNA, 20 bp, Artificial
  20-mer unique DNA sequence
gggggccgtgggatatgagg

SEQ ID NO: 477 - DNA, 20 bp, Artificial
  20-mer unique DNA sequence
atgcggccgtgttgatttgc

SEQ ID NO: 478 - DNA, 20 bp, Artificial
  20-mer unique DNA sequence
gttaccgcgggcttctgtgg

SEQ ID NO: 479 - DNA, 20 bp, Artificial
  20-mer unique DNA sequence
aatgatggcggtggaggacg

SEQ ID NO: 480 - DNA, 20 bp, Artificial
  20-mer unique DNA sequence
aggtcgacaggaggggaggc

SEQ ID NO: 481 - DNA, 20 bp, Artificial
  20-mer unique DNA sequence
aaacaatgtcgcacgtcggg

SEQ ID NO: 482 - DNA, 20 bp, Artificial
  20-mer unique DNA sequence
gcctcacgcacaacagaccg

SEQ ID NO: 483 - DNA, 20 bp, Artificial
  20-mer unique DNA sequence
cacgtggcgccctctccctt

SEQ ID NO: 484 - DNA, 20 bp, Artificial
  20-mer unique DNA sequence
atcgtaagggtttttgggct

SEQ ID NO: 485 - DNA, 20 bp, Artificial
  20-mer unique DNA sequence
cggtccagccatccacaagg

SEQ ID NO: 486 - DNA, 20 bp, Artificial
  20-mer unique DNA sequence
ggggcttagtgctggtggga

SEQ ID NO: 487 - DNA, 20 bp, Artificial
  20-mer unique DNA sequence
gggtctgggggcgattacaa

SEQ ID NO: 488 - DNA, 20 bp, Artificial
  20-mer unique DNA sequence
cgccgagaaaaacagccagc

SEQ ID NO: 489 - DNA, 20 bp, Artificial
  20-mer unique DNA sequence
tgtgggttgacgagctggcg

SEQ ID NO: 490 - DNA, 20 bp, Artificial
  20-mer unique DNA sequence
acgaatgtgagtgcctgggg

SEQ ID NO: 491 - DNA, 20 bp, Artificial
  20-mer unique DNA sequence
gcttggtgattgtggcggag

SEQ ID NO: 492 - DNA, 20 bp, Artificial
  20-mer unique DNA sequence
ctcacgccgcttatttcgcc

SEQ ID NO: 493 - DNA, 20 bp, Artificial
  20-mer unique DNA sequence
gggcggaggaccggtacaga

SEQ ID NO: 494 - DNA, 20 bp, Artificial
  20-mer unique DNA sequence
aacgtggcgggctggtgtaa

SEQ ID NO: 495 - DNA, 20 bp, Artificial
  20-mer unique DNA sequence
ccggattaacgaccacgcct

SEQ ID NO: 496 - DNA, 20 bp, Artificial
  20-mer unique DNA sequence
cgcacaggtccccagccaac

SEQ ID NO: 497 - DNA, 20 bp, Artificial
  20-mer unique DNA sequence
tctgccgcttcccaataccg

SEQ ID NO: 498 - DNA, 20 bp, Artificial
  20-mer unique DNA sequence
gcaacctggcctcgacaacg

SEQ ID NO: 499 - DNA, 20 bp, Artificial
  20-mer unique DNA sequence
acggtcctgcgaaactgccc

SEQ ID NO: 500 - DNA, 20 bp, Artificial
  20-mer unique DNA sequence
ttacgggagggacggcaatg

SEQ ID NO: 501 - DNA, 20 bp, Artificial
  20-mer unique DNA sequence
aaagtgggtcgtggggcgat

SEQ ID NO: 502 - DNA, 20 bp, Artificial
  20-mer unique DNA sequence
gaggggcaaccgaaagcgag

SEQ ID NO: 503 - DNA, 20 bp, Artificial
  20-mer unique DNA sequence
ggtcgagtggggggcctttg

SEQ ID NO: 504 - DNA, 20 bp, Artificial
  20-mer unique DNA sequence
gatcggggtttagacggggg

SEQ ID NO: 505 - DNA, 20 bp, Artificial
  20-mer unique DNA sequence
tgttgggcgaagaatgctgg

SEQ ID NO: 506 - DNA, 20 bp, Artificial
  20-mer unique DNA sequence
acatcgattaccgaccgccc

SEQ ID NO: 507 - DNA, 20 bp, Artificial
  20-mer unique DNA sequence
ggcggggtgagttggtgctt

SEQ ID NO: 508 - DNA, 20 bp, Artificial
  20-mer unique DNA sequence
tagggagggggggtgaacga

SEQ ID NO: 509 - DNA, 20 bp, Artificial
  20-mer unique DNA sequence
atatcagaaggaccggcgcg

SEQ ID NO: 510 - DNA, 20 bp, Artificial
  20-mer unique DNA sequence
aaacgccaccgcatacccag

SEQ ID NO: 511 - DNA, 20 bp, Artificial
  20-mer unique DNA sequence
ggtggctgggagagagcgga

SEQ ID NO: 512 - DNA, 20 bp, Artificial
  20-mer unique DNA sequence
gtgacaaatgctgggcgcct

SEQ ID NO: 513 - DNA, 20 bp, Artificial
  20-mer unique DNA sequence
tcgtagattgacccgcgcct

SEQ ID NO: 514 - DNA, 20 bp, Artificial
  20-mer unique DNA sequence
accgcccgaagtgtgctcac

SEQ ID NO: 515 - DNA, 20 bp, Artificial
  20-mer unique DNA sequence
accccatttcgccggttcct

SEQ ID NO: 516 - DNA, 20 bp, Artificial
  20-mer unique DNA sequence
agcgagggttgcgggtgaaa

SEQ ID NO: 517 - DNA, 20 bp, Artificial
  20-mer unique DNA sequence
tccccattcaaccggctctt

SEQ ID NO: 518 - DNA, 20 bp, Artificial
  20-mer unique DNA sequence
tcgccgcacagccctagacc

SEQ ID NO: 519 - DNA, 20 bp, Artificial
  20-mer unique DNA sequence
gggtcaaggggtgcagctgg

SEQ ID NO: 520 - DNA, 20 bp, Artificial
  20-mer unique DNA sequence
tcgggggaccttggttttag

SEQ ID NO: 521 - DNA, 20 bp, Artificial
  20-mer unique DNA sequence
taaccaggccggagcgacag

SEQ ID NO: 522 - DNA, 20 bp, Artificial
  20-mer unique DNA sequence
ccgctccaacacccccacag

SEQ ID NO: 523 - DNA, 20 bp, Artificial
  20-mer unique DNA sequence
ctacaacgctgcactcccgc

SEQ ID NO: 524 - DNA, 20 bp, Artificial
  20-mer unique DNA sequence
agcgagttagccgggtggcc

SEQ ID NO: 525 - DNA, 20 bp, Artificial
  20-mer unique DNA sequence
tacatcccgccaccacccac

SEQ ID NO: 526 - DNA, 20 bp, Artificial
  20-mer unique DNA sequence
tttttgcgcgccactgctct

SEQ ID NO: 527 - DNA, 20 bp, Artificial
  20-mer unique DNA sequence
tcgacaggccggaacaaagc

SEQ ID NO: 528 - DNA, 20 bp, Artificial
  20-mer unique DNA sequence
ccgtcgtcgccatagtctgg

SEQ ID NO: 529 - DNA, 20 bp, Artificial
  20-mer unique DNA sequence
gctggctaactgcggtgacg

SEQ ID NO: 530 - DNA, 20 bp, Artificial
  20-mer unique DNA sequence
cacacgaaatctggcgctcg

SEQ ID NO: 531 - DNA, 20 bp, Artificial
  20-mer unique DNA sequence
tcggactaggtgcattgccg

SEQ ID NO: 532 - DNA, 20 bp, Artificial
  20-mer unique DNA sequence
cgccctgacgagcaaccact

SEQ ID NO: 533 - DNA, 20 bp, Artificial
  20-mer unique DNA sequence
accggcgccccatactcaag

SEQ ID NO: 534 - DNA, 20 bp, Artificial
  20-mer unique DNA sequence
ggagttcccggtcagacgtt

SEQ ID NO: 535 - DNA, 20 bp, Artificial
  20-mer unique DNA sequence
cgggtcgttgcctggtctgg

SEQ ID NO: 536 - DNA, 20 bp, Artificial
  20-mer unique DNA sequence
tccgcagctggggatcatac

SEQ ID NO: 537 - DNA, 20 bp, Artificial
  20-mer unique DNA sequence
tcaaaacggacgccccaaca

SEQ ID NO: 538 - DNA, 20 bp, Artificial
  20-mer unique DNA sequence
aaggaagaggctggggcacg

SEQ ID NO: 539 - DNA, 20 bp, Artificial
  20-mer unique DNA sequence
acggtcggctagcaggttgg

SEQ ID NO: 540 - DNA, 20 bp, Artificial
  20-mer unique DNA sequence
ttccgcctcgatcccttcca

SEQ ID NO: 541 - DNA, 20 bp, Artificial
  20-mer unique DNA sequence
catcgctcgctacgcgatct

SEQ ID NO: 542 - DNA, 20 bp, Artificial
  20-mer unique DNA sequence
cgacactccaagctcccggg

SEQ ID NO: 543 - DNA, 20 bp, Artificial
  20-mer unique DNA sequence
gcccgtgccctcaattggat

SEQ ID NO: 544 - DNA, 20 bp, Artificial
  20-mer unique DNA sequence
tcgggctcagtgcgtacaac

SEQ ID NO: 545 - DNA, 20 bp, Artificial
  20-mer unique DNA sequence
tgcgcttaggtccgcaacat

SEQ ID NO: 546 - DNA, 20 bp, Artificial
  20-mer unique DNA sequence
agggcttgagattcgggcgg

SEQ ID NO: 547 - DNA, 20 bp, Artificial
  20-mer unique DNA sequence
aggtgcgctgtggggggaag

SEQ ID NO: 548 - DNA, 20 bp, Artificial
  20-mer unique DNA sequence
gcgggtgtggagtagcgagc

SEQ ID NO: 549 - DNA, 20 bp, Artificial
  20-mer unique DNA sequence
ccgcggcaccaagtaggaat

SEQ ID NO: 550 - DNA, 20 bp, Artificial
  20-mer unique DNA sequence
ccgacatagagccgcacctg

SEQ ID NO: 551 - DNA, 20 bp, Artificial
  20-mer unique DNA sequence
gaaactccgctccgcacccc

SEQ ID NO: 552 - DNA, 20 bp, Artificial
  20-mer unique DNA sequence
ggaaagctaaagggcacgcg

SEQ ID NO: 553 - DNA, 20 bp, Artificial
  20-mer unique DNA sequence
ctgcgcggtgtcttttgcct

SEQ ID NO: 554 - DNA, 20 bp, Artificial
  20-mer unique DNA sequence
tcctctgcggtggtcgtgtc

SEQ ID NO: 555 - DNA, 20 bp, Artificial
  20-mer unique DNA sequence
ctcaggggtagtgcaggcga

SEQ ID NO: 556 - DNA, 20 bp, Artificial
  20-mer unique DNA sequence
ggcgattccaagggcgagtt

SEQ ID NO: 557 - DNA, 20 bp, Artificial
  20-mer unique DNA sequence
ctctgcgcattaagcgccat

SEQ ID NO: 558 - DNA, 20 bp, Artificial
  20-mer unique DNA sequence
ttccgcccaccacctatcga

SEQ ID NO: 559 - DNA, 20 bp, Artificial
  20-mer unique DNA sequence
gagggcgcgcttgtcacttt

SEQ ID NO: 560 - DNA, 20 bp, Artificial
  20-mer unique DNA sequence
accaccattcggacccatcc

SEQ ID NO: 561 - DNA, 20 bp, Artificial
  20-mer unique DNA sequence
tcaggcatggcgtgggtttg

SEQ ID NO: 562 - DNA, 20 bp, Artificial
  20-mer unique DNA sequence
aagtggggcaggcgatcatc

SEQ ID NO: 563 - DNA, 20 bp, Artificial
  20-mer unique DNA sequence
cgtcaggcgagcaccggtta

SEQ ID NO: 564 - DNA, 20 bp, Artificial
  20-mer unique DNA sequence
gctcccgctgatggttgctt

SEQ ID NO: 565 - DNA, 20 bp, Artificial
  20-mer unique DNA sequence
cagacgaacaccgccgaccg

SEQ ID NO: 566 - DNA, 20 bp, Artificial
  20-mer unique DNA sequence
gggcccggtcatcttctcct

SEQ ID NO: 567 - DNA, 20 bp, Artificial
  20-mer unique DNA sequence
aggccgtgcgtggtaaggat

SEQ ID NO: 568 - DNA, 20 bp, Artificial
  20-mer unique DNA sequence
acggccgtcacagctgcttt

SEQ ID NO: 569 - DNA, 20 bp, Artificial
  20-mer unique DNA sequence
catccgggtgggtagacgcg

SEQ ID NO: 570 - DNA, 20 bp, Artificial
  20-mer unique DNA sequence
ctgcccaaccctcatcgcgt

SEQ ID NO: 571 - DNA, 20 bp, Artificial
  20-mer unique DNA sequence
ggataggctcgcaaaacggg

SEQ ID NO: 572 - DNA, 20 bp, Artificial
  20-mer unique DNA sequence
ctgatcgctcgcccaaatga

SEQ ID NO: 573 - DNA, 20 bp, Artificial
  20-mer unique DNA sequence
ccggcaggggaatgatgaag

SEQ ID NO: 574 - DNA, 20 bp, Artificial
  20-mer unique DNA sequence
tcattaccgtcgtgcccccg

SEQ ID NO: 575 - DNA, 20 bp, Artificial
  20-mer unique DNA sequence
gtcatggtgtgcggggctgt

SEQ ID NO: 576 - DNA, 20 bp, Artificial
  20-mer unique DNA sequence
accgtgcgaacggaacagtc

SEQ ID NO: 577 - DNA, 20 bp, Artificial
  20-mer unique DNA sequence
aaaatcaaggcacggggacg

SEQ ID NO: 578 - DNA, 20 bp, Artificial
  20-mer unique DNA sequence
cgcttcacaacccccagtcc

SEQ ID NO: 579 - DNA, 20 bp, Artificial
  20-mer unique DNA sequence
gttgtttgcatgcctccgga

SEQ ID NO: 580 - DNA, 20 bp, Artificial
  20-mer unique DNA sequence
ctgcctcgttcgtcgccttg

SEQ ID NO: 581 - DNA, 20 bp, Artificial
  20-mer unique DNA sequence
ttgttactcgtccggccctg

SEQ ID NO: 582 - DNA, 20 bp, Artificial
  20-mer unique DNA sequence
cgcacaagtatccccccgat

SEQ ID NO: 583 - DNA, 20 bp, Artificial
  20-mer unique DNA sequence
ccttgctccatcgcccttcg

SEQ ID NO: 584 - DNA, 20 bp, Artificial
  20-mer unique DNA sequence
cgcggccgtggtcatgttta

SEQ ID NO: 585 - DNA, 20 bp, Artificial
  20-mer unique DNA sequence
gcgatgggttggtggccttg

SEQ ID NO: 586 - DNA, 20 bp, Artificial
  20-mer unique DNA sequence
agagtggggggaaagtggcg

SEQ ID NO: 587 - DNA, 20 bp, Artificial
  20-mer unique DNA sequence
tcgaatagggaagcagcgca

SEQ ID NO: 588 - DNA, 20 bp, Artificial
  20-mer unique DNA sequence
tgcggcgtggcttgcttaca

SEQ ID NO: 589 - DNA, 20 bp, Artificial
  20-mer unique DNA sequence
acgaaaccggtatggggcag

SEQ ID NO: 590 - DNA, 20 bp, Artificial
  20-mer unique DNA sequence
ggctcccgcactcataaccg

SEQ ID NO: 591 - DNA, 20 bp, Artificial
  20-mer unique DNA sequence
accccccccagtttagtcgg

SEQ ID NO: 592 - DNA, 20 bp, Artificial
  20-mer unique DNA sequence
gcgcaccgttcccatgtttg

SEQ ID NO: 593 - DNA, 20 bp, Artificial
  20-mer unique DNA sequence
gccccgcaaaaaaaagcaca

SEQ ID NO: 594 - DNA, 20 bp, Artificial
  20-mer unique DNA sequence
acggcacgcggagagagaga

SEQ ID NO: 595 - DNA, 20 bp, Artificial
  20-mer unique DNA sequence
ggactaatgcaccccgcctc

SEQ ID NO: 596 - DNA, 20 bp, Artificial
  20-mer unique DNA sequence
ccggacgccttcgcacctta

SEQ ID NO: 597 - DNA, 20 bp, Artificial
  20-mer unique DNA sequence
cttggcggtgttctcggacg

SEQ ID NO: 598 - DNA, 20 bp, Artificial
  20-mer unique DNA sequence
ccccacaccgacttgcacca

SEQ ID NO: 599 - DNA, 20 bp, Artificial
  20-mer unique DNA sequence
cccccctgcggaagtacgtc

SEQ ID NO: 600 - DNA, 20 bp, Artificial
  20-mer unique DNA sequence
cagtggggctttaggcgtcg

SEQ ID NO: 601 - DNA, 20 bp, Artificial
  20-mer unique DNA sequence
tgctttctctccggggcgtc

SEQ ID NO: 602 - DNA, 20 bp, Artificial
  20-mer unique DNA sequence
tggcgggttggtgcattttg

SEQ ID NO: 603 - DNA, 20 bp, Artificial
  20-mer unique DNA sequence
agcggaggcgacacataggg

SEQ ID NO: 604 - DNA, 20 bp, Artificial
  20-mer unique DNA sequence
gccttaccccttccagcccg

SEQ ID NO: 605 - DNA, 20 bp, Artificial
  20-mer unique DNA sequence
gctggatcggaggggacttg

SEQ ID NO: 606 - DNA, 20 bp, Artificial
  20-mer unique DNA sequence
aggtcggactggtcctgact

SEQ ID NO: 607 - DNA, 20 bp, Artificial
  20-mer unique DNA sequence
tgctgcacccttaacgaggt

SEQ ID NO: 608 - DNA, 20 bp, Artificial
  20-mer unique DNA sequence
aactttgaaccacccgcgca

SEQ ID NO: 609 - DNA, 20 bp, Artificial
  20-mer unique DNA sequence
ggttagggggggattcgagg

SEQ ID NO: 610 - DNA, 20 bp, Artificial
  20-mer unique DNA sequence
gtgtcttcgatttgcgcggg

SEQ ID NO: 611 - DNA, 20 bp, Artificial
  20-mer unique DNA sequence
aacagtagcagcgcagccca

SEQ ID NO: 612 - DNA, 20 bp, Artificial
  20-mer unique DNA sequence
accgccaagctgcacgaaac

SEQ ID NO: 613 - DNA, 20 bp, Artificial
  20-mer unique DNA sequence
ctgcgcatttccgtccttca

SEQ ID NO: 614 - DNA, 20 bp, Artificial
  20-mer unique DNA sequence
cactcgaccacaccgctccc

SEQ ID NO: 615 - DNA, 20 bp, Artificial
  20-mer unique DNA sequence
ggggctggaacgtgatggaa

SEQ ID NO: 616 - DNA, 20 bp, Artificial
  20-mer unique DNA sequence
gtgtttcgaggggggtgcag

SEQ ID NO: 617 - DNA, 20 bp, Artificial
  20-mer unique DNA sequence
ttcgttctcagcttcccgcc

SEQ ID NO: 618 - DNA, 20 bp, Artificial
  20-mer unique DNA sequence
ccgtggtgttcggcctctcg

SEQ ID NO: 619 - DNA, 20 bp, Artificial
  20-mer unique DNA sequence
aacttgcccccaccaactcg

SEQ ID NO: 620 - DNA, 20 bp, Artificial
  20-mer unique DNA sequence
cggggcggacatttgagtgg

SEQ ID NO: 621 - DNA, 20 bp, Artificial
  20-mer unique DNA sequence
gattaaaccgcctccgcccg

SEQ ID NO: 622 - DNA, 20 bp, Artificial
  20-mer unique DNA sequence
gccgcttccgattaccccac

SEQ ID NO: 623 - DNA, 20 bp, Artificial
  20-mer unique DNA sequence
acaaatcaccccagcgccca

SEQ ID NO: 624 - DNA, 20 bp, Artificial
  20-mer unique DNA sequence
agggccagcacgtaccgcaa

SEQ ID NO: 625 - DNA, 20 bp, Artificial
  20-mer unique DNA sequence
caaacgtggggcaaaaccgg

SEQ ID NO: 626 - DNA, 20 bp, Artificial
  20-mer unique DNA sequence
ataccacatcgcacggccgg

SEQ ID NO: 627 - DNA, 20 bp, Artificial
  20-mer unique DNA sequence
catcccgccacaaatcgctc

SEQ ID NO: 628 - DNA, 20 bp, Artificial
  20-mer unique DNA sequence
ctcccgaccttaagccgcct

SEQ ID NO: 629 - DNA, 20 bp, Artificial
  20-mer unique DNA sequence
ggaggacagcgggatggggt

SEQ ID NO: 630 - DNA, 20 bp, Artificial
  20-mer unique DNA sequence
ccggtgcgcgatgctagaat

SEQ ID NO: 631 - DNA, 20 bp, Artificial
  20-mer unique DNA sequence
ttgcttacggtcgggcttgc

SEQ ID NO: 632 - DNA, 20 bp, Artificial
  20-mer unique DNA sequence
ggacgctgacacgtcgttgt

SEQ ID NO: 633 - DNA, 20 bp, Artificial
  20-mer unique DNA sequence
tgtaacgtaccgtcgcgagc

SEQ ID NO: 634 - DNA, 20 bp, Artificial
  20-mer unique DNA sequence
aggtcggtgggggcagtgtg

SEQ ID NO: 635 - DNA, 20 bp, Artificial
  20-mer unique DNA sequence
gcagggtagggcggggattc

SEQ ID NO: 636 - DNA, 20 bp, Artificial
  20-mer unique DNA sequence
tgttgggttgcgtgtggtga

SEQ ID NO: 637 - DNA, 20 bp, Artificial
  20-mer unique DNA sequence
caccaccccattcgccgttc

SEQ ID NO: 638 - DNA, 20 bp, Artificial
  20-mer unique DNA sequence
aagccccagacaccgccgac

SEQ ID NO: 639 - DNA, 20 bp, Artificial
  20-mer unique DNA sequence
ccgttggattgtttggacga

SEQ ID NO: 640 - DNA, 20 bp, Artificial
  20-mer unique DNA sequence
gcaagaagcgcggggtacat

SEQ ID NO: 641 - DNA, 20 bp, Artificial
  20-mer unique DNA sequence
tgaggatgaggcacggagca

SEQ ID NO: 642 - DNA, 20 bp, Artificial
  20-mer unique DNA sequence
ccgccgtaaccacgaatggc

SEQ ID NO: 643 - DNA, 20 bp, Artificial
  20-mer unique DNA sequence
gacggcttacggggtcctgg

SEQ ID NO: 644 - DNA, 20 bp, Artificial
  20-mer unique DNA sequence
tttcctcctatacgcgcgcc

SEQ ID NO: 645 - DNA, 20 bp, Artificial
  20-mer unique DNA sequence
cacctagaccctgcctcccg

SEQ ID NO: 646 - DNA, 20 bp, Artificial
  20-mer unique DNA sequence
acgagcaaaatgggcggacg

SEQ ID NO: 647 - DNA, 20 bp, Artificial
  20-mer unique DNA sequence
gcccgcgccgtagttgtgac

SEQ ID NO: 648 - DNA, 20 bp, Artificial
  20-mer unique DNA sequence
aatggcctcgggctgggaag

SEQ ID NO: 649 - DNA, 20 bp, Artificial
  20-mer unique DNA sequence
taggggcggggatcagcgtc

SEQ ID NO: 650 - DNA, 20 bp, Artificial
  20-mer unique DNA sequence
cgcgaactctcagaggcact

SEQ ID NO: 651 - DNA, 20 bp, Artificial
  20-mer unique DNA sequence
tcgactggtcagggactgga

SEQ ID NO: 652 - DNA, 20 bp, Artificial
  20-mer unique DNA sequence
agcggaaagagaagaaccgg

SEQ ID NO: 653 - DNA, 20 bp, Artificial
  20-mer unique DNA sequence
cgctctgcctctggtctccg

SEQ ID NO: 654 - DNA, 20 bp, Artificial
  20-mer unique DNA sequence
tctgggtatgctctccgggg

SEQ ID NO: 655 - DNA, 20 bp, Artificial
  20-mer unique DNA sequence
tcagggggacgttgtggctc

SEQ ID NO: 656 - DNA, 20 bp, Artificial
  20-mer unique DNA sequence
acaccgcaccatctcaccgc

SEQ ID NO: 657 - DNA, 20 bp, Artificial
  20-mer unique DNA sequence
aattccttttcgcggctggc

SEQ ID NO: 658 - DNA, 20 bp, Artificial
  20-mer unique DNA sequence
tcgctgggcccttgttctgt

SEQ ID NO: 659 - DNA, 20 bp, Artificial
  20-mer unique DNA sequence
ggcaaaggatgcagggccta

SEQ ID NO: 660 - DNA, 20 bp, Artificial
  20-mer unique DNA sequence
tgggccgtgggttggaataa

SEQ ID NO: 661 - DNA, 20 bp, Artificial
  20-mer unique DNA sequence
aatggcaatcgcacggtggt

SEQ ID NO: 662 - DNA, 20 bp, Artificial
  20-mer unique DNA sequence
ggaaggcatggctggaagga

SEQ ID NO: 663 - DNA, 20 bp, Artificial
  20-mer unique DNA sequence
ggtcgtcgtctcgggctctt

SEQ ID NO: 664 - DNA, 20 bp, Artificial
  20-mer unique DNA sequence
ccgaaccccttatgccaccc

SEQ ID NO: 665 - DNA, 20 bp, Artificial
  20-mer unique DNA sequence
tacaactgcctcccccaccc

SEQ ID NO: 666 - DNA, 20 bp, Artificial
  20-mer unique DNA sequence
ctgaccgcggcctaactgct

SEQ ID NO: 667 - DNA, 20 bp, Artificial
  20-mer unique DNA sequence
cagattggcagtgggagcga

SEQ ID NO: 668 - DNA, 20 bp, Artificial
  20-mer unique DNA sequence
cttctccttttccgcgccca

SEQ ID NO: 669 - DNA, 20 bp, Artificial
  20-mer unique DNA sequence
gcatcatcgaaagcaggggg

SEQ ID NO: 670 - DNA, 20 bp, Artificial
  20-mer unique DNA sequence
aattgtttagcgccggccga

SEQ ID NO: 671 - DNA, 20 bp, Artificial
  20-mer unique DNA sequence
ccgaaccccactgcacgtga

SEQ ID NO: 672 - DNA, 20 bp, Artificial
  20-mer unique DNA sequence
cgcaacggactggggatcat

SEQ ID NO: 673 - DNA, 20 bp, Artificial
  20-mer unique DNA sequence
tccccccccctgtgcttaac

SEQ ID NO: 674 - DNA, 20 bp, Artificial
  20-mer unique DNA sequence
gactccggcttcgcttgcgg

SEQ ID NO: 675 - DNA, 20 bp, Artificial
  20-mer unique DNA sequence
cccaagccctgattcccctg

SEQ ID NO: 676 - DNA, 20 bp, Artificial
  20-mer unique DNA sequence
tgtttccctggcgcttcgtc

SEQ ID NO: 677 - DNA, 20 bp, Artificial
  20-mer unique DNA sequence
gaaggcgatggggagaccga

SEQ ID NO: 678 - DNA, 20 bp, Artificial
  20-mer unique DNA sequence
cgtctcactccgcccttgcg

SEQ ID NO: 679 - DNA, 20 bp, Artificial
  20-mer unique DNA sequence
tcccatcaccacgtccagcg

SEQ ID NO: 680 - DNA, 20 bp, Artificial
  20-mer unique DNA sequence
ttttgattcccggacgctgg

SEQ ID NO: 681 - DNA, 20 bp, Artificial
  20-mer unique DNA sequence
cctggccctgcttcgtaacg

SEQ ID NO: 682 - DNA, 20 bp, Artificial
  20-mer unique DNA sequence
gccgcttcgctgttactcgt

SEQ ID NO: 683 - DNA, 20 bp, Artificial
  20-mer unique DNA sequence
cgggtgggcgcaatgaagag

SEQ ID NO: 684 - DNA, 20 bp, Artificial
  20-mer unique DNA sequence
gcggaagatagcggggatgc

SEQ ID NO: 685 - DNA, 20 bp, Artificial
  20-mer unique DNA sequence
tctggttgcgtggcgtgatt

SEQ ID NO: 686 - DNA, 20 bp, Artificial
  20-mer unique DNA sequence
ggttttcgacgcctgccttg

SEQ ID NO: 687 - DNA, 20 bp, Artificial
  20-mer unique DNA sequence
tcggcagagcattaaggggt

SEQ ID NO: 688 - DNA, 20 bp, Artificial
  20-mer unique DNA sequence
ctccgcacgcaacaccaacg

SEQ ID NO: 689 - DNA, 20 bp, Artificial
  20-mer unique DNA sequence
acaggcaaccaaccaagcgc

SEQ ID NO: 690 - DNA, 20 bp, Artificial
  20-mer unique DNA sequence
ttacgtaggaggtcggcgcg

SEQ ID NO: 691 - DNA, 20 bp, Artificial
  20-mer unique DNA sequence
cgaactgcgcacccaccact

SEQ ID NO: 692 - DNA, 20 bp, Artificial
  20-mer unique DNA sequence
tgcagtgggtcctttcgtgg

SEQ ID NO: 693 - DNA, 20 bp, Artificial
  20-mer unique DNA sequence
gcacgcgcaataacgacccc

SEQ ID NO: 694 - DNA, 20 bp, Artificial
  20-mer unique DNA sequence
caaaaagcaaccagtcggcg

SEQ ID NO: 695 - DNA, 20 bp, Artificial
  20-mer unique DNA sequence
cgaattccccgcgcataact

SEQ ID NO: 696 - DNA, 20 bp, Artificial
  20-mer unique DNA sequence
aggatggggggattttcgag

SEQ ID NO: 697 - DNA, 20 bp, Artificial
  20-mer unique DNA sequence
acccgcggcctgctacaaat

SEQ ID NO: 698 - DNA, 20 bp, Artificial
  20-mer unique DNA sequence
acccatgacggactccccta

SEQ ID NO: 699 - DNA, 20 bp, Artificial
  20-mer unique DNA sequence
atgggtcccgtcacgcttca

SEQ ID NO: 700 - DNA, 20 bp, Artificial
  20-mer unique DNA sequence
aaacattacggcggggagca

SEQ ID NO: 701 - DNA, 20 bp, Artificial
  20-mer unique DNA sequence
catcgttactaggcgccggg

SEQ ID NO: 702 - DNA, 20 bp, Artificial
  20-mer unique DNA sequence
cgcctgccgctctccgacta

SEQ ID NO: 703 - DNA, 20 bp, Artificial
  20-mer unique DNA sequence
cgccctcctaccccacgcta

SEQ ID NO: 704 - DNA, 20 bp, Artificial
  20-mer unique DNA sequence
tcagccgcccaacctagtcc

SEQ ID NO: 705 - DNA, 20 bp, Artificial
  20-mer unique DNA sequence
gggaatcaggcgcgaggaca

SEQ ID NO: 706 - DNA, 20 bp, Artificial
  20-mer unique DNA sequence
ttggggttctccttggcctg

SEQ ID NO: 707 - DNA, 20 bp, Artificial
  20-mer unique DNA sequence
tggcgcgggggatctgtagt

SEQ ID NO: 708 - DNA, 20 bp, Artificial
  20-mer unique DNA sequence
cgctccctcacacatccacg

SEQ ID NO: 709 - DNA, 20 bp, Artificial
  20-mer unique DNA sequence
tggccgtgtgtctttcctcg

SEQ ID NO: 710 - DNA, 20 bp, Artificial
  20-mer unique DNA sequence
ctgcgcgcaacagaggtcgt

SEQ ID NO: 711 - DNA, 20 bp, Artificial
  20-mer unique DNA sequence
cgccacgccgaggtaaccac

SEQ ID NO: 712 - DNA, 20 bp, Artificial
  20-mer unique DNA sequence
agccctctgacctgcacctt

SEQ ID NO: 713 - DNA, 20 bp, Artificial
  20-mer unique DNA sequence
attgtacgtgtgctgcggcg

SEQ ID NO: 714 - DNA, 20 bp, Artificial
  20-mer unique DNA sequence
cgcacgccctaccaaacgct

SEQ ID NO: 715 - DNA, 20 bp, Artificial
  20-mer unique DNA sequence
gaacagacgggtgggcgagg

SEQ ID NO: 716 - DNA, 20 bp, Artificial
  20-mer unique DNA sequence
tgtttcgggatctgctcgca

SEQ ID NO: 717 - DNA, 20 bp, Artificial
  20-mer unique DNA sequence
cgccgcgcaattatgttacg

SEQ ID NO: 718 - DNA, 20 bp, Artificial
  20-mer unique DNA sequence
aaacgctggcaggccaggaa

SEQ ID NO: 719 - DNA, 20 bp, Artificial
  20-mer unique DNA sequence
tacgttgcgagctgccacta

SEQ ID NO: 720 - DNA, 20 bp, Artificial
  20-mer unique DNA sequence
acaaaagacggcggagggga

SEQ ID NO: 721 - DNA, 20 bp, Artificial
  20-mer unique DNA sequence
agccccccaccgaaccattg

SEQ ID NO: 722 - DNA, 20 bp, Artificial
  20-mer unique DNA sequence
actgtgatttcggggggggt

SEQ ID NO: 723 - DNA, 20 bp, Artificial
  20-mer unique DNA sequence
tgttatccgagggtgccgcc

SEQ ID NO: 724 - DNA, 20 bp, Artificial
  20-mer unique DNA sequence
atgggggctgcttaccgtgt

SEQ ID NO: 725 - DNA, 20 bp, Artificial
  20-mer unique DNA sequence
cctgtttctcgcgtggtggg

SEQ ID NO: 726 - DNA, 20 bp, Artificial
  20-mer unique DNA sequence
ccccggtaaggatgggccaa

SEQ ID NO: 727 - DNA, 20 bp, Artificial
  20-mer unique DNA sequence
gcggtcgaaatggtcagggc

SEQ ID NO: 728 - DNA, 20 bp, Artificial
  20-mer unique DNA sequence
acggggtcactgggggctgt

SEQ ID NO: 729 - DNA, 20 bp, Artificial
  20-mer unique DNA sequence
acagcaagggtgggtcagcg

SEQ ID NO: 730 - DNA, 20 bp, Artificial
  20-mer unique DNA sequence
tcgcagccggggaacactag

SEQ ID NO: 731 - DNA, 20 bp, Artificial
  20-mer unique DNA sequence
cccgcccgtaaagttgcagc

SEQ ID NO: 732 - DNA, 20 bp, Artificial
  20-mer unique DNA sequence
gcccaacgcagagcccatca

SEQ ID NO: 733 - DNA, 20 bp, Artificial
  20-mer unique DNA sequence
cacccatacgcaacggccaa

SEQ ID NO: 734 - DNA, 20 bp, Artificial
  20-mer unique DNA sequence
gtgttttcatcccccgccat

SEQ ID NO: 735 - DNA, 20 bp, Artificial
  20-mer unique DNA sequence
aaatggcgatgaggcgacga

SEQ ID NO: 736 - DNA, 20 bp, Artificial
  20-mer unique DNA sequence
aaattatcgggcgggggtcc

SEQ ID NO: 737 - DNA, 20 bp, Artificial
  20-mer unique DNA sequence
gcgggggacaaaatcagctc

SEQ ID NO: 738 - DNA, 20 bp, Artificial
  20-mer unique DNA sequence
tgcacgcctctcatttcccg

SEQ ID NO: 739 - DNA, 20 bp, Artificial
  20-mer unique DNA sequence
ggaatggtggcaggaagggg

SEQ ID NO: 740 - DNA, 20 bp, Artificial
  20-mer unique DNA sequence
gagttgttcccgtgcgcttg

SEQ ID NO: 741 - DNA, 20 bp, Artificial
  20-mer unique DNA sequence
cgaatgggggtgctgttggg

SEQ ID NO: 742 - DNA, 20 bp, Artificial
  20-mer unique DNA sequence
cacttttccggcgacttggc

SEQ ID NO: 743 - DNA, 20 bp, Artificial
  20-mer unique DNA sequence
gcaccgcagaacccaaccag

SEQ ID NO: 744 - DNA, 20 bp, Artificial
  20-mer unique DNA sequence
aaaatccgccccccatcaaa

SEQ ID NO: 745 - DNA, 20 bp, Artificial
  20-mer unique DNA sequence
gcacactgacgaaccgccga

SEQ ID NO: 746 - DNA, 20 bp, Artificial
  20-mer unique DNA sequence
tcataagcccggaagcgcca

SEQ ID NO: 747 - DNA, 20 bp, Artificial
  20-mer unique DNA sequence
cctccagccgcacttttcga

SEQ ID NO: 748 - DNA, 20 bp, Artificial
  20-mer unique DNA sequence
ccaacccgccatcagcaaaa

SEQ ID NO: 749 - DNA, 20 bp, Artificial
  20-mer unique DNA sequence
cgtccctcctgacaccccat

SEQ ID NO: 750 - DNA, 20 bp, Artificial
  20-mer unique DNA sequence
cggtgaaggggaatgcgaac

SEQ ID NO: 751 - DNA, 20 bp, Artificial
  20-mer unique DNA sequence
tgtggccgcatggtcgatat

SEQ ID NO: 752 - DNA, 20 bp, Artificial
  20-mer unique DNA sequence
cgacctgcctacccgctccc

SEQ ID NO: 753 - DNA, 20 bp, Artificial
  20-mer unique DNA sequence
gctttggcctcggttgctgt

SEQ ID NO: 754 - DNA, 20 bp, Artificial
  20-mer unique DNA sequence
cgttacccgcatccagcaaa

SEQ ID NO: 755 - DNA, 20 bp, Artificial
  20-mer unique DNA sequence
gcgccaattagaccgacccc

SEQ ID NO: 756 - DNA, 20 bp, Artificial
  20-mer unique DNA sequence
gacggtgtggggcgaaggtg

SEQ ID NO: 757 - DNA, 20 bp, Artificial
  20-mer unique DNA sequence
acagcttcgcacagggcagt

SEQ ID NO: 758 - DNA, 20 bp, Artificial
  20-mer unique DNA sequence
gtcggttaagcggcggtgtg

SEQ ID NO: 759 - DNA, 20 bp, Artificial
  20-mer unique DNA sequence
cgacacgcctcacgaacgac

SEQ ID NO: 760 - DNA, 20 bp, Artificial
  20-mer unique DNA sequence
gcgcggcccctcaaccttat

SEQ ID NO: 761 - DNA, 20 bp, Artificial
  20-mer unique DNA sequence
accgggtcacgtaggctcaa

SEQ ID NO: 762 - DNA, 20 bp, Artificial
  20-mer unique DNA sequence
ggagacccagcgtggatgaa

SEQ ID NO: 763 - DNA, 20 bp, Artificial
  20-mer unique DNA sequence
ttcgaccggcacccttgttt

SEQ ID NO: 764 - DNA, 20 bp, Artificial
  20-mer unique DNA sequence
gccagccaacccatcaccct

SEQ ID NO: 765 - DNA, 20 bp, Artificial
  20-mer unique DNA sequence
agggtggcgcataacggagt

SEQ ID NO: 766 - DNA, 20 bp, Artificial
  20-mer unique DNA sequence
tagccgcgcccattgagaac

SEQ ID NO: 767 - DNA, 20 bp, Artificial
  20-mer unique DNA sequence
atcccaccccgctacttgca

SEQ ID NO: 768 - DNA, 20 bp, Artificial
  20-mer unique DNA sequence
ggcgcagctcaaaccaccga

SEQ ID NO: 769 - DNA, 20 bp, Artificial
  20-mer unique DNA sequence
tcgacaggggccagaagacg

SEQ ID NO: 770 - DNA, 20 bp, Artificial
  20-mer unique DNA sequence
agcgttagtgcgttggcgaa

SEQ ID NO: 771 - DNA, 20 bp, Artificial
  20-mer unique DNA sequence
tggcgcgaaagggatggttg

SEQ ID NO: 772 - DNA, 20 bp, Artificial
  20-mer unique DNA sequence
gtgcttgggggatgcgctta

SEQ ID NO: 773 - DNA, 20 bp, Artificial
  20-mer unique DNA sequence
ctcccgtgcgccttgacctc

SEQ ID NO: 774 - DNA, 20 bp, Artificial
  20-mer unique DNA sequence
tcacgtgtttggggcagagg

SEQ ID NO: 775 - DNA, 20 bp, Artificial
  20-mer unique DNA sequence
cccgcgcctccttcgtaatc

SEQ ID NO: 776 - DNA, 20 bp, Artificial
  20-mer unique DNA sequence
gaaacaaggtgcgcggatga

SEQ ID NO: 777 - DNA, 20 bp, Artificial
  20-mer unique DNA sequence
ttccccgcaaaaacacccaa

SEQ ID NO: 778 - DNA, 20 bp, Artificial
  20-mer unique DNA sequence
cgctttggtcgccctctcag

SEQ ID NO: 779 - DNA, 20 bp, Artificial
  20-mer unique DNA sequence
attctatcgatcgcgccggg

SEQ ID NO: 780 - DNA, 20 bp, Artificial
  20-mer unique DNA sequence
gatgggtggcgggtgattct

SEQ ID NO: 781 - DNA, 20 bp, Artificial
  20-mer unique DNA sequence
gggtatgggggtgtctcggg

SEQ ID NO: 782 - DNA, 20 bp, Artificial
  20-mer unique DNA sequence
gcggggagggggagacagac

SEQ ID NO: 783 - DNA, 20 bp, Artificial
  20-mer unique DNA sequence
caaacgccggaatcaagccc

SEQ ID NO: 784 - DNA, 20 bp, Artificial
  20-mer unique DNA sequence
ggccttcatgctacccctgg

SEQ ID NO: 785 - DNA, 20 bp, Artificial
  20-mer unique DNA sequence
tgtgattggttgtcggggcg

SEQ ID NO: 786 - DNA, 20 bp, Artificial
  20-mer unique DNA sequence
cgaggccgactaagtgctga

SEQ ID NO: 787 - DNA, 20 bp, Artificial
  20-mer unique DNA sequence
tctctcacgggtggccagaa

SEQ ID NO: 788 - DNA, 20 bp, Artificial
  20-mer unique DNA sequence
taggcccccaatcaaacccc

SEQ ID NO: 789 - DNA, 20 bp, Artificial
  20-mer unique DNA sequence
acatcatcatcgcccgctca

SEQ ID NO: 790 - DNA, 20 bp, Artificial
  20-mer unique DNA sequence
agacttcccccttccgcccc

SEQ ID NO: 791 - DNA, 20 bp, Artificial
  20-mer unique DNA sequence
ttagcccaacccgcccgatt

SEQ ID NO: 792 - DNA, 20 bp, Artificial
  20-mer unique DNA sequence
tggaaggggactaacgcggg

SEQ ID NO: 793 - DNA, 20 bp, Artificial
  20-mer unique DNA sequence
acacacgccgagaaccacga

SEQ ID NO: 794 - DNA, 20 bp, Artificial
  20-mer unique DNA sequence
cgggcgatgaggggaagtac

SEQ ID NO: 795 - DNA, 20 bp, Artificial
  20-mer unique DNA sequence
gcttgcgttgcgctgtccta

SEQ ID NO: 796 - DNA, 20 bp, Artificial
  20-mer unique DNA sequence
ccgcgttgtttggttgccgt

SEQ ID NO: 797 - DNA, 20 bp, Artificial
  20-mer unique DNA sequence
cgtggcaagggaacagggca

SEQ ID NO: 798 - DNA, 20 bp, Artificial
  20-mer unique DNA sequence
atcgtgcctttcgcctccaa

SEQ ID NO: 799 - DNA, 20 bp, Artificial
  20-mer unique DNA sequence
atgcgagacggggtggaaag

SEQ ID NO: 800 - DNA, 20 bp, Artificial
  20-mer unique DNA sequence
aattacctccccaccccaga

SEQ ID NO: 801 - DNA, 20 bp, Artificial
  20-mer unique DNA sequence
aagttggttcgcgtcggtgg

SEQ ID NO: 802 - DNA, 20 bp, Artificial
  20-mer unique DNA sequence
acgggacggggcgagttacg

SEQ ID NO: 803 - DNA, 20 bp, Artificial
  20-mer unique DNA sequence
cgctacgggcttgcaaacag

SEQ ID NO: 804 - DNA, 20 bp, Artificial
  20-mer unique DNA sequence
ccgccgcacatccaaagcta

SEQ ID NO: 805 - DNA, 20 bp, Artificial
  20-mer unique DNA sequence
ttccaaaatccaccgtcgcc

SEQ ID NO: 806 - DNA, 20 bp, Artificial
  20-mer unique DNA sequence
gctggaaactgcgggagggt

SEQ ID NO: 807 - DNA, 20 bp, Artificial
  20-mer unique DNA sequence
gcggctgagtgggtgtctcc

SEQ ID NO: 808 - DNA, 20 bp, Artificial
  20-mer unique DNA sequence
ccccttccaccctacgtccc

SEQ ID NO: 809 - DNA, 20 bp, Artificial
  20-mer unique DNA sequence
cggagacgaaacgcgcaaca

SEQ ID NO: 810 - DNA, 20 bp, Artificial
  20-mer unique DNA sequence
agcttcagccgggaacgtag

SEQ ID NO: 811 - DNA, 20 bp, Artificial
  20-mer unique DNA sequence
gtgggccgagatcagtccaa

SEQ ID NO: 812 - DNA, 20 bp, Artificial
  20-mer unique DNA sequence
caccgcccgtccaaacactt

SEQ ID NO: 813 - DNA, 20 bp, Artificial
  20-mer unique DNA sequence
gaggggtaatggggcgaacg

SEQ ID NO: 814 - DNA, 20 bp, Artificial
  20-mer unique DNA sequence
agctcttctgacggggccac

SEQ ID NO: 815 - DNA, 20 bp, Artificial
  20-mer unique DNA sequence
ccccgtcgcatggaatttga

SEQ ID NO: 816 - DNA, 20 bp, Artificial
  20-mer unique DNA sequence
tcgcgcaaggagctgtatcg

SEQ ID NO: 817 - DNA, 20 bp, Artificial
  20-mer unique DNA sequence
ccgtccccgcagcatacata

SEQ ID NO: 818 - DNA, 20 bp, Artificial
  20-mer unique DNA sequence
gggaaatggtggctgctgcg

SEQ ID NO: 819 - DNA, 20 bp, Artificial
  20-mer unique DNA sequence
ccctctgcgcccttcatcca

SEQ ID NO: 820 - DNA, 20 bp, Artificial
  20-mer unique DNA sequence
tcgttgagcaccccagcctt

SEQ ID NO: 821 - DNA, 20 bp, Artificial
  20-mer unique DNA sequence
atggttagggtcgggtgggg

SEQ ID NO: 822 - DNA, 20 bp, Artificial
  20-mer unique DNA sequence
cgcgcatacacggacaaggt

SEQ ID NO: 823 - DNA, 20 bp, Artificial
  20-mer unique DNA sequence
cctgcagcgcctatccaccc

SEQ ID NO: 824 - DNA, 20 bp, Artificial
  20-mer unique DNA sequence
ttcgtgccgtgctgtatggg

SEQ ID NO: 825 - DNA, 20 bp, Artificial
  20-mer unique DNA sequence
attgcaactgggtgggggct

SEQ ID NO: 826 - DNA, 20 bp, Artificial
  20-mer unique DNA sequence
aaggccgtgggggaatgttt

SEQ ID NO: 827 - DNA, 20 bp, Artificial
  20-mer unique DNA sequence
caaccacacccaagccccca

SEQ ID NO: 828 - DNA, 20 bp, Artificial
  20-mer unique DNA sequence
accttgccgcgttacacccc

SEQ ID NO: 829 - DNA, 20 bp, Artificial
  20-mer unique DNA sequence
tatctcaccacgccgccagc

SEQ ID NO: 830 - DNA, 20 bp, Artificial
  20-mer unique DNA sequence
gtcccctcccattcgtccct

SEQ ID NO: 831 - DNA, 20 bp, Artificial
  20-mer unique DNA sequence
gagtttcctgtcccgtgcgc

SEQ ID NO: 832 - DNA, 20 bp, Artificial
  20-mer unique DNA sequence
aaatggggggagcgcaggtg

SEQ ID NO: 833 - DNA, 20 bp, Artificial
  20-mer unique DNA sequence
gctgtttcgcttgccgccat

SEQ ID NO: 834 - DNA, 20 bp, Artificial
  20-mer unique DNA sequence
cgcctcacctctccaccacc

SEQ ID NO: 835 - DNA, 20 bp, Artificial
  20-mer unique DNA sequence
agcaagagtcggggaggcac

SEQ ID NO: 836 - DNA, 20 bp, Artificial
  20-mer unique DNA sequence
cgcaccgagagcacgacagt

SEQ ID NO: 837 - DNA, 20 bp, Artificial
  20-mer unique DNA sequence
ggggtccggctgttgatgtg

SEQ ID NO: 838 - DNA, 20 bp, Artificial
  20-mer unique DNA sequence
ctgcgcaaacgacccacatg

SEQ ID NO: 839 - DNA, 20 bp, Artificial
  20-mer unique DNA sequence
gaggcgcgtgcataccattg

SEQ ID NO: 840 - DNA, 20 bp, Artificial
  20-mer unique DNA sequence
ccacgctctccctccaccaa

SEQ ID NO: 841 - DNA, 20 bp, Artificial
  20-mer unique DNA sequence
agctactggccgagcgaagt

SEQ ID NO: 842 - DNA, 20 bp, Artificial
  20-mer unique DNA sequence
accacccgccaaaacagtcc

SEQ ID NO: 843 - DNA, 20 bp, Artificial
  20-mer unique DNA sequence
agggtcagcggaagcaaggg

SEQ ID NO: 844 - DNA, 20 bp, Artificial
  20-mer unique DNA sequence
cgccgcctgcgtcatgtatt

SEQ ID NO: 845 - DNA, 20 bp, Artificial
  20-mer unique DNA sequence
caacagtgcgtcgaagccga

SEQ ID NO: 846 - DNA, 20 bp, Artificial
  20-mer unique DNA sequence
ggcggagcgtagccgaagtt

SEQ ID NO: 847 - DNA, 20 bp, Artificial
  20-mer unique DNA sequence
tggggtcgaagagcgaggca

SEQ ID NO: 848 - DNA, 20 bp, Artificial
  20-mer unique DNA sequence
aatcggacaccaggcaccca

SEQ ID NO: 849 - DNA, 20 bp, Artificial
  20-mer unique DNA sequence
gggcatgggtggagagcagt

SEQ ID NO: 850 - DNA, 20 bp, Artificial
  20-mer unique DNA sequence
ccgactccccaaagccctgc

SEQ ID NO: 851 - DNA, 20 bp, Artificial
  20-mer unique DNA sequence
tgctcgttcgtctgtgcctg

SEQ ID NO: 852 - DNA, 20 bp, Artificial
  20-mer unique DNA sequence
ccagctcgcctccccttctt

SEQ ID NO: 853 - DNA, 20 bp, Artificial
  20-mer unique DNA sequence
atacttctccccgcgccctg

SEQ ID NO: 854 - DNA, 20 bp, Artificial
  20-mer unique DNA sequence
ttggtttgctccctcctcga

SEQ ID NO: 855 - DNA, 20 bp, Artificial
  20-mer unique DNA sequence
ggagcattcccgttgcacaa

SEQ ID NO: 856 - DNA, 20 bp, Artificial
  20-mer unique DNA sequence
agtcgccatgacccttcggt

SEQ ID NO: 857 - DNA, 20 bp, Artificial
  20-mer unique DNA sequence
agcgcccgaaaactgcacgt

SEQ ID NO: 858 - DNA, 20 bp, Artificial
  20-mer unique DNA sequence
tggacgaagcgaaaggggag

SEQ ID NO: 859 - DNA, 20 bp, Artificial
  20-mer unique DNA sequence
ttgtcgcgcgcttatctcca

SEQ ID NO: 860 - DNA, 20 bp, Artificial
  20-mer unique DNA sequence
atgacactcgcgataggccc

SEQ ID NO: 861 - DNA, 20 bp, Artificial
  20-mer unique DNA sequence
gaggggggcgattttcttcc

SEQ ID NO: 862 - DNA, 20 bp, Artificial
  20-mer unique DNA sequence
ggcctcctgcagttatcccg

SEQ ID NO: 863 - DNA, 20 bp, Artificial
  20-mer unique DNA sequence
tggtatcctctccgtgcccg

SEQ ID NO: 864 - DNA, 20 bp, Artificial
  20-mer unique DNA sequence
agggacggaggccaggatag

SEQ ID NO: 865 - DNA, 20 bp, Artificial
  20-mer unique DNA sequence
agaggggcgagcattcacgg

SEQ ID NO: 866 - DNA, 20 bp, Artificial
  20-mer unique DNA sequence
gtcagggattgtcggtgcgc

SEQ ID NO: 867 - DNA, 20 bp, Artificial
  20-mer unique DNA sequence
agagtgcgcaaaaacggggc

SEQ ID NO: 868 - DNA, 20 bp, Artificial
  20-mer unique DNA sequence
gccattttctcgggggcaca

SEQ ID NO: 869 - DNA, 20 bp, Artificial
  20-mer unique DNA sequence
accccaccctcttgcgtctg

SEQ ID NO: 870 - DNA, 20 bp, Artificial
  20-mer unique DNA sequence
attgcagctcccgcggacta

SEQ ID NO: 871 - DNA, 20 bp, Artificial
  20-mer unique DNA sequence
gcctatgagcctacggcgaa

SEQ ID NO: 872 - DNA, 20 bp, Artificial
  20-mer unique DNA sequence
cagcaaattccaggcggtgg

SEQ ID NO: 873 - DNA, 20 bp, Artificial
  20-mer unique DNA sequence
gcagcagggcttcaccgagt

SEQ ID NO: 874 - DNA, 20 bp, Artificial
  20-mer unique DNA sequence
tccataacgcagaaaacgcc

SEQ ID NO: 875 - DNA, 20 bp, Artificial
  20-mer unique DNA sequence
agcccaaaggaggacgcgaa

SEQ ID NO: 876 - DNA, 20 bp, Artificial
  20-mer unique DNA sequence
tgtggggcggattcaaaggt

SEQ ID NO: 877 - DNA, 20 bp, Artificial
  20-mer unique DNA sequence
ttgttccggcccctcgttca

SEQ ID NO: 878 - DNA, 20 bp, Artificial
  20-mer unique DNA sequence
tccagtccgacacatacggc

SEQ ID NO: 879 - DNA, 20 bp, Artificial
  20-mer unique DNA sequence
gagcgccgggtatccaatgc

SEQ ID NO: 880 - DNA, 20 bp, Artificial
  20-mer unique DNA sequence
ccagccacttttcttgcccc

SEQ ID NO: 881 - DNA, 20 bp, Artificial
  20-mer unique DNA sequence
acccggccacctagcatcaa

SEQ ID NO: 882 - DNA, 20 bp, Artificial
  20-mer unique DNA sequence
gccgcgagctcagacctaat

SEQ ID NO: 883 - DNA, 20 bp, Artificial
  20-mer unique DNA sequence
agtaaggccgacggacagtg

SEQ ID NO: 884 - DNA, 20 bp, Artificial
  20-mer unique DNA sequence
tctgcctttgggctgtcgga

SEQ ID NO: 885 - DNA, 20 bp, Artificial
  20-mer unique DNA sequence
aaggaggcacagggagcgga

SEQ ID NO: 886 - DNA, 20 bp, Artificial
  20-mer unique DNA sequence
cgaacacatccgcacgcaac

SEQ ID NO: 887 - DNA, 20 bp, Artificial
  20-mer unique DNA sequence
tcggcgttgccctttttctg

SEQ ID NO: 888 - DNA, 20 bp, Artificial
  20-mer unique DNA sequence
acaccagccccccctgtctg

SEQ ID NO: 889 - DNA, 20 bp, Artificial
  20-mer unique DNA sequence
agattcgcaccgaccccacg

SEQ ID NO: 890 - DNA, 20 bp, Artificial
  20-mer unique DNA sequence
tcaacccgtgtactgagccc

SEQ ID NO: 891 - DNA, 20 bp, Artificial
  20-mer unique DNA sequence
gtgttctacgcgagtgcggt

SEQ ID NO: 892 - DNA, 20 bp, Artificial
  20-mer unique DNA sequence
gggttcagatgtttgcgggg

SEQ ID NO: 893 - DNA, 20 bp, Artificial
  20-mer unique DNA sequence
cctcatcccccgttctgctg

SEQ ID NO: 894 - DNA, 20 bp, Artificial
  20-mer unique DNA sequence
gccgttcatgctttgtgccc

SEQ ID NO: 895 - DNA, 20 bp, Artificial
  20-mer unique DNA sequence
gtgggtggacaccgtgtgat

SEQ ID NO: 896 - DNA, 20 bp, Artificial
  20-mer unique DNA sequence
acaaatggtgcgcgtggtgc

SEQ ID NO: 897 - DNA, 20 bp, Artificial
  20-mer unique DNA sequence
gctggggttcgaggtgcttc

SEQ ID NO: 898 - DNA, 20 bp, Artificial
  20-mer unique DNA sequence
ctcttgcgacgacggaccct

SEQ ID NO: 899 - DNA, 20 bp, Artificial
  20-mer unique DNA sequence
ggggtttcgactgatgcgcg

SEQ ID NO: 900 - DNA, 20 bp, Artificial
  20-mer unique DNA sequence
ccttaacgcgccttttgtcg

SEQ ID NO: 901 - DNA, 20 bp, Artificial
  20-mer unique DNA sequence
gcctccaggacgtcaactca

SEQ ID NO: 902 - DNA, 20 bp, Artificial
  20-mer unique DNA sequence
tctgcgccatccggcttgac

SEQ ID NO: 903 - DNA, 20 bp, Artificial
  20-mer unique DNA sequence
cggaacgggctgcggtctta

SEQ ID NO: 904 - DNA, 20 bp, Artificial
  20-mer unique DNA sequence
atgatgcccgttacccctgc

SEQ ID NO: 905 - DNA, 20 bp, Artificial
  20-mer unique DNA sequence
tcacacattccccttcgcca

SEQ ID NO: 906 - DNA, 20 bp, Artificial
  20-mer unique DNA sequence
tcccaccaagcgatccacca

SEQ ID NO: 907 - DNA, 20 bp, Artificial
  20-mer unique DNA sequence
agcgggactagggtgggcat

SEQ ID NO: 908 - DNA, 20 bp, Artificial
  20-mer unique DNA sequence
gctttcgaccgtggtagcca

SEQ ID NO: 909 - DNA, 20 bp, Artificial
  20-mer unique DNA sequence
tagcgtgagatcgcggacac

SEQ ID NO: 910 - DNA, 20 bp, Artificial
  20-mer unique DNA sequence
gtgaatcgcggaaacccccc

SEQ ID NO: 911 - DNA, 20 bp, Artificial
  20-mer unique DNA sequence
gcggtttatgctttgtgccc

SEQ ID NO: 912 - DNA, 20 bp, Artificial
  20-mer unique DNA sequence
tgacctcccctttgcaccgg

SEQ ID NO: 913 - DNA, 20 bp, Artificial
  20-mer unique DNA sequence
cttagacgtcggccgagtga

SEQ ID NO: 914 - DNA, 20 bp, Artificial
  20-mer unique DNA sequence
cccccgctagtcccgttctc

SEQ ID NO: 915 - DNA, 20 bp, Artificial
  20-mer unique DNA sequence
atgaccggaagaggccccac

SEQ ID NO: 916 - DNA, 20 bp, Artificial
  20-mer unique DNA sequence
tgttccggcagggtttggct

SEQ ID NO: 917 - DNA, 20 bp, Artificial
  20-mer unique DNA sequence
gtcggtctgtcgcaaagggg

SEQ ID NO: 918 - DNA, 20 bp, Artificial
  20-mer unique DNA sequence
gtgcagcctagggtgttcct

SEQ ID NO: 919 - DNA, 20 bp, Artificial
  20-mer unique DNA sequence
tctacggcatccgtggacct

SEQ ID NO: 920 - DNA, 20 bp, Artificial
  20-mer unique DNA sequence
cacctggccgatcgttttcc

SEQ ID NO: 921 - DNA, 20 bp, Artificial
  20-mer unique DNA sequence
tcgccactacccggaaaacc

SEQ ID NO: 922 - DNA, 20 bp, Artificial
  20-mer unique DNA sequence
cccaatacgcctgccatcgc

SEQ ID NO: 923 - DNA, 20 bp, Artificial
  20-mer unique DNA sequence
gtgggggcgagcgtgttgag

SEQ ID NO: 924 - DNA, 20 bp, Artificial
  20-mer unique DNA sequence
gatctcgccgcctacaaccg

SEQ ID NO: 925 - DNA, 20 bp, Artificial
  20-mer unique DNA sequence
acgatcccagctgcacacca

SEQ ID NO: 926 - DNA, 20 bp, Artificial
  20-mer unique DNA sequence
gcaggctaggtgcagcctta

SEQ ID NO: 927 - DNA, 20 bp, Artificial
  20-mer unique DNA sequence
ccgtcaccccttgctccacc

SEQ ID NO: 928 - DNA, 20 bp, Artificial
  20-mer unique DNA sequence
gaaggcgggggattggatgt

SEQ ID NO: 929 - DNA, 20 bp, Artificial
  20-mer unique DNA sequence
cgggtttggttggcgtcatt

SEQ ID NO: 930 - DNA, 20 bp, Artificial
  20-mer unique DNA sequence
gtggggcttgggaacaaacg

SEQ ID NO: 931 - DNA, 20 bp, Artificial
  20-mer unique DNA sequence
cgcacagccccaccagaaac

SEQ ID NO: 932 - DNA, 20 bp, Artificial
  20-mer unique DNA sequence
ataaggggcagaggggcagg

SEQ ID NO: 933 - DNA, 20 bp, Artificial
  20-mer unique DNA sequence
taggccccgagcgatgcaaa

SEQ ID NO: 934 - DNA, 20 bp, Artificial
  20-mer unique DNA sequence
gctccatgctacccgaaaac

SEQ ID NO: 935 - DNA, 20 bp, Artificial
  20-mer unique DNA sequence
tgtggtttgtgggctcggat

SEQ ID NO: 936 - DNA, 20 bp, Artificial
  20-mer unique DNA sequence
gacgacaacggcaccacgaa

SEQ ID NO: 937 - DNA, 20 bp, Artificial
  20-mer unique DNA sequence
ctaatggcgtacggcgggat

SEQ ID NO: 938 - DNA, 20 bp, Artificial
  20-mer unique DNA sequence
cgggggtgggtttgaaggga

SEQ ID NO: 939 - DNA, 20 bp, Artificial
  20-mer unique DNA sequence
cgaaaccacccacgaaggcg

SEQ ID NO: 940 - DNA, 20 bp, Artificial
  20-mer unique DNA sequence
cgacaattccccagccccag

SEQ ID NO: 941 - DNA, 20 bp, Artificial
  20-mer unique DNA sequence
tcccacccagcgtcctcttt

SEQ ID NO: 942 - DNA, 20 bp, Artificial
  20-mer unique DNA sequence
cggggaacgctctggaatga

SEQ ID NO: 943 - DNA, 20 bp, Artificial
  20-mer unique DNA sequence
attgccgtgaagatgccccg

SEQ ID NO: 944 - DNA, 20 bp, Artificial
  20-mer unique DNA sequence
ccaaaatcgcgtccggccta

SEQ ID NO: 945 - DNA, 20 bp, Artificial
  20-mer unique DNA sequence
caaccgccccagaccatttt

SEQ ID NO: 946 - DNA, 20 bp, Artificial
  20-mer unique DNA sequence
cttgaatccttgcgcaccga

SEQ ID NO: 947 - DNA, 20 bp, Artificial
  20-mer unique DNA sequence
atcactccggccagcattcg

SEQ ID NO: 948 - DNA, 20 bp, Artificial
  20-mer unique DNA sequence
caaaagcgaaaaccgggcag

SEQ ID NO: 949 - DNA, 20 bp, Artificial
  20-mer unique DNA sequence
ctattgggttcgcggcaggg

SEQ ID NO: 950 - DNA, 20 bp, Artificial
  20-mer unique DNA sequence
gtatgggacggcggaagtgg

SEQ ID NO: 951 - DNA, 20 bp, Artificial
  20-mer unique DNA sequence
ccgcctcattgccctatcgt

SEQ ID NO: 952 - DNA, 20 bp, Artificial
  20-mer unique DNA sequence
cgccccatttagccgaacga

SEQ ID NO: 953 - DNA, 20 bp, Artificial
  20-mer unique DNA sequence
ggcactttcgtggcggggtt

SEQ ID NO: 954 - DNA, 20 bp, Artificial
  20-mer unique DNA sequence
tcccacgcaagcccatcaaa

SEQ ID NO: 955 - DNA, 20 bp, Artificial
  20-mer unique DNA sequence
aaaaaaggcagcgcgagacc

SEQ ID NO: 956 - DNA, 20 bp, Artificial
  20-mer unique DNA sequence
accgaaatgacgaccccccc

SEQ ID NO: 957 - DNA, 20 bp, Artificial
  20-mer unique DNA sequence
ggattgggcccgtctctgag

SEQ ID NO: 958 - DNA, 20 bp, Artificial
  20-mer unique DNA sequence
ccgccccctacgcaatcaag

SEQ ID NO: 959 - DNA, 20 bp, Artificial
  20-mer unique DNA sequence
tatggggagcacgaccggga

SEQ ID NO: 960 - DNA, 20 bp, Artificial
  20-mer unique DNA sequence
gcacccctcggcaccatatt

SEQ ID NO: 961 - DNA, 20 bp, Artificial
  20-mer unique DNA sequence
gttcaaggtcggtttgtgca

SEQ ID NO: 962 - DNA, 20 bp, Artificial
  20-mer unique DNA sequence
cccggtgtatgcgcttttcc

SEQ ID NO: 963 - DNA, 20 bp, Artificial
  20-mer unique DNA sequence
gggtcggcctggaagatgtg

SEQ ID NO: 964 - DNA, 20 bp, Artificial
  20-mer unique DNA sequence
tacgacaacgggccatgcaa

SEQ ID NO: 965 - DNA, 20 bp, Artificial
  20-mer unique DNA sequence
ggcccgtcgcagctgtcatt

SEQ ID NO: 966 - DNA, 20 bp, Artificial
  20-mer unique DNA sequence
ccacgtccgccccctgtaat

SEQ ID NO: 967 - DNA, 20 bp, Artificial
  20-mer unique DNA sequence
gggtacagtgggcttggggg

SEQ ID NO: 968 - DNA, 20 bp, Artificial
  20-mer unique DNA sequence
tccacccgatctccaccgtt

SEQ ID NO: 969 - DNA, 20 bp, Artificial
  20-mer unique DNA sequence
ggcaggcattttacggtcgg

SEQ ID NO: 970 - DNA, 20 bp, Artificial
  20-mer unique DNA sequence
gcagtgggcgagagagcgga

SEQ ID NO: 971 - DNA, 20 bp, Artificial
  20-mer unique DNA sequence
tcccaagccggtcaaagcga

SEQ ID NO: 972 - DNA, 20 bp, Artificial
  20-mer unique DNA sequence
tggagggaggtgcgtgatgc

SEQ ID NO: 973 - DNA, 20 bp, Artificial
  20-mer unique DNA sequence
atggggatcacaagggctgc

SEQ ID NO: 974 - DNA, 20 bp, Artificial
  20-mer unique DNA sequence
acattagccagaccccccgc

SEQ ID NO: 975 - DNA, 20 bp, Artificial
  20-mer unique DNA sequence
aggtgcgtggcgaggttgga

SEQ ID NO: 976 - DNA, 20 bp, Artificial
  20-mer unique DNA sequence
agtcacgggaggtcttgggc

SEQ ID NO: 977 - DNA, 20 bp, Artificial
  20-mer unique DNA sequence
gggcgtggggatgaaaggag

SEQ ID NO: 978 - DNA, 20 bp, Artificial
  20-mer unique DNA sequence
agttggttcgtgcggatggg

SEQ ID NO: 979 - DNA, 20 bp, Artificial
  20-mer unique DNA sequence
aacccctacccgccgccaat

SEQ ID NO: 980 - DNA, 20 bp, Artificial
  20-mer unique DNA sequence
ccatcagtacagcccgcccg

SEQ ID NO: 981 - DNA, 20 bp, Artificial
  20-mer unique DNA sequence
ccggctccccatcctttgtc

SEQ ID NO: 982 - DNA, 20 bp, Artificial
  20-mer unique DNA sequence
gattagggagcgcggggagg

SEQ ID NO: 983 - DNA, 20 bp, Artificial
  20-mer unique DNA sequence
ttccaccacctgccaccaaa

SEQ ID NO: 984 - DNA, 20 bp, Artificial
  20-mer unique DNA sequence
aaagggtcggggggatatcg

SEQ ID NO: 985 - DNA, 20 bp, Artificial
  20-mer unique DNA sequence
gggaaggatgggtgcgtttg

SEQ ID NO: 986 - DNA, 20 bp, Artificial
  20-mer unique DNA sequence
tgtctgcatggaagccggga

SEQ ID NO: 987 - DNA, 20 bp, Artificial
  20-mer unique DNA sequence
ctagcaaagaacgggggcgg

SEQ ID NO: 988 - DNA, 20 bp, Artificial
  20-mer unique DNA sequence
acccgcccccagaccaaata

SEQ ID NO: 989 - DNA, 20 bp, Artificial
  20-mer unique DNA sequence
tgccgtgggcttgagttcgt

SEQ ID NO: 990 - DNA, 20 bp, Artificial
  20-mer unique DNA sequence
tccttcttccggcgcctatg

SEQ ID NO: 991 - DNA, 20 bp, Artificial
  20-mer unique DNA sequence
ccgagaaggggccaaatacg

SEQ ID NO: 992 - DNA, 20 bp, Artificial
  20-mer unique DNA sequence
gcgcgacggagaatgtgatg

SEQ ID NO: 993 - DNA, 20 bp, Artificial
  20-mer unique DNA sequence
ccatagacagaagggccgcg

SEQ ID NO: 994 - DNA, 20 bp, Artificial
  20-mer unique DNA sequence
tatgccgcctctcttccgct

SEQ ID NO: 995 - DNA, 20 bp, Artificial
  20-mer unique DNA sequence
tccgatgttgtgaggaggcg

SEQ ID NO: 996 - DNA, 20 bp, Artificial
  20-mer unique DNA sequence
acggaagtacgggggggcag

SEQ ID NO: 997 - DNA, 20 bp, Artificial
  20-mer unique DNA sequence
atgacgtcggcggtgttcca

SEQ ID NO: 998 - DNA, 20 bp, Artificial
  20-mer unique DNA sequence
ccccgaccaccgaaaacgag

SEQ ID NO: 999 - DNA, 20 bp, Artificial
  20-mer unique DNA sequence
cggcgagcaaggcataggga

SEQ ID NO: 1000 - DNA, 20 bp, Artificial
  20-mer unique DNA sequence
atgacggtcggcgtactgga

SEQ ID NO: 1001 - DNA, 20 bp, Artificial
  20-mer unique DNA sequence
gagcacggggtctcacgtat

SEQ ID NO: 1002 - DNA, 20 bp, Artificial
  20-mer unique DNA sequence
ccactccttccgtatcccgc

SEQ ID NO: 1003 - DNA, 20 bp, Artificial
  20-mer unique DNA sequence
gataaaagcgcgggccaacc

SEQ ID NO: 1004 - DNA, 20 bp, Artificial
  20-mer unique DNA sequence
ggcaatcatggggcgcaaac

SEQ ID NO: 1005 - DNA, 20 bp, Artificial
  20-mer unique DNA sequence
acgtaacaggaccgctggtg

SEQ ID NO: 1006 - DNA, 20 bp, Artificial
  20-mer unique DNA sequence
accatcctccccccctcgtc

SEQ ID NO: 1007 - DNA, 20 bp, Artificial
  20-mer unique DNA sequence
aatggcacggaagaccgcaa

SEQ ID NO: 1008 - DNA, 20 bp, Artificial
  20-mer unique DNA sequence
acgggtcctcagatccgtct

SEQ ID NO: 1009 - DNA, 20 bp, Artificial
  20-mer unique DNA sequence
aaacagtctggtcgcacgga

SEQ ID NO: 1010 - DNA, 20 bp, Artificial
  20-mer unique DNA sequence
gctccgggggtctgccataa

SEQ ID NO: 1011 - DNA, 20 bp, Artificial
  20-mer unique DNA sequence
ccgggacggtggttgaagat

SEQ ID NO: 1012 - DNA, 20 bp, Artificial
  20-mer unique DNA sequence
atccgccagacattcccacg

SEQ ID NO: 1013 - DNA, 20 bp, Artificial
  20-mer unique DNA sequence
agtggcggggttgcgttagg

SEQ ID NO: 1014 - DNA, 20 bp, Artificial
  20-mer unique DNA sequence
cgctcgggtgcgctacatta

SEQ ID NO: 1015 - DNA, 20 bp, Artificial
  20-mer unique DNA sequence
tcccgcgcggtctagttaca

SEQ ID NO: 1016 - DNA, 20 bp, Artificial
  20-mer unique DNA sequence
aggccccgtgttgtttgcgg

SEQ ID NO: 1017 - DNA, 20 bp, Artificial
  20-mer unique DNA sequence
cacccccgcctgctgatctc

SEQ ID NO: 1018 - DNA, 20 bp, Artificial
  20-mer unique DNA sequence
aagtcgtggcgggaggcaac

SEQ ID NO: 1019 - DNA, 20 bp, Artificial
  20-mer unique DNA sequence
cgccgctctacccctttcag

SEQ ID NO: 1020 - DNA, 20 bp, Artificial
  20-mer unique DNA sequence
gcgtgtgtgtcctgcttggg

SEQ ID NO: 1021 - DNA, 20 bp, Artificial
  20-mer unique DNA sequence
ccgtccgtctttgcctgtcg

SEQ ID NO: 1022 - DNA, 20 bp, Artificial
  20-mer unique DNA sequence
gggctatcgttggtgtgggc

SEQ ID NO: 1023 - DNA, 20 bp, Artificial
  20-mer unique DNA sequence
agaggcggggctaggtccaa

SEQ ID NO: 1024 - DNA, 20 bp, Artificial
  20-mer unique DNA sequence
caggcgcaaaggtaccacgg

SEQ ID NO: 1025 - DNA, 20 bp, Artificial
  20-mer unique DNA sequence
cgcctatccacgcccatcct

SEQ ID NO: 1026 - DNA, 20 bp, Artificial
  20-mer unique DNA sequence
ccggccatgaggtgtcgttt

SEQ ID NO: 1027 - DNA, 20 bp, Artificial
  20-mer unique DNA sequence
ggcccgtggaggattcattg

SEQ ID NO: 1028 - DNA, 20 bp, Artificial
  20-mer unique DNA sequence
atctcaccccgcaggccatt

SEQ ID NO: 1029 - DNA, 20 bp, Artificial
  20-mer unique DNA sequence
aagcacggcgggaaattgat

SEQ ID NO: 1030 - DNA, 20 bp, Artificial
  20-mer unique DNA sequence
ccgtcactccccctcgaatc

SEQ ID NO: 1031 - DNA, 20 bp, Artificial
  20-mer unique DNA sequence
ttggcccccgtgcttctctt

SEQ ID NO: 1032 - DNA, 20 bp, Artificial
  20-mer unique DNA sequence
cgcaacggccggtagaatgt

SEQ ID NO: 1033 - DNA, 20 bp, Artificial
  20-mer unique DNA sequence
caagactcgctaaccgccgc

SEQ ID NO: 1034 - DNA, 20 bp, Artificial
  20-mer unique DNA sequence
cgacagccccaagcccctaa

SEQ ID NO: 1035 - DNA, 20 bp, Artificial
  20-mer unique DNA sequence
gttgacaggggtcggtggcg

SEQ ID NO: 1036 - DNA, 20 bp, Artificial
  20-mer unique DNA sequence
gtcaaagccccccgcaatgt

SEQ ID NO: 1037 - DNA, 20 bp, Artificial
  20-mer unique DNA sequence
gcctcctcctattgcgctcg

SEQ ID NO: 1038 - DNA, 20 bp, Artificial
  20-mer unique DNA sequence
cggggcctgtctcgtgctgt

SEQ ID NO: 1039 - DNA, 20 bp, Artificial
  20-mer unique DNA sequence
gagcacccgtaaggcccatg

SEQ ID NO: 1040 - DNA, 20 bp, Artificial
  20-mer unique DNA sequence
cgaccccccgtgagcaacta

SEQ ID NO: 1041 - DNA, 20 bp, Artificial
  20-mer unique DNA sequence
acatgacttgcgccggtgac

SEQ ID NO: 1042 - DNA, 20 bp, Artificial
  20-mer unique DNA sequence
gcggcgtggggtgattctgt

SEQ ID NO: 1043 - DNA, 20 bp, Artificial
  20-mer unique DNA sequence
agtggatgtgggggagcgac

SEQ ID NO: 1044 - DNA, 20 bp, Artificial
  20-mer unique DNA sequence
cggatggtgtgcaactgggg

SEQ ID NO: 1045 - DNA, 20 bp, Artificial
  20-mer unique DNA sequence
gtcctccgtgcgcttgttgc

SEQ ID NO: 1046 - DNA, 20 bp, Artificial
  20-mer unique DNA sequence
tccacgcggcactcactctt

SEQ ID NO: 1047 - DNA, 20 bp, Artificial
  20-mer unique DNA sequence
ccgagtggccgaagcaaacg

SEQ ID NO: 1048 - DNA, 20 bp, Artificial
  20-mer unique DNA sequence
tcccggggtagtttgtggca

SEQ ID NO: 1049 - DNA, 20 bp, Artificial
  20-mer unique DNA sequence
atgcgtgagggggatgaacc

SEQ ID NO: 1050 - DNA, 20 bp, Artificial
  20-mer unique DNA sequence
tagcttgtgggacctgcgga

SEQ ID NO: 1051 - DNA, 20 bp, Artificial
  20-mer unique DNA sequence
tgacctgagatacgccgccg

SEQ ID NO: 1052 - DNA, 20 bp, Artificial
  20-mer unique DNA sequence
ccccccacggtcttcatgtt

SEQ ID NO: 1053 - DNA, 20 bp, Artificial
  20-mer unique DNA sequence
cccgttgttatgagcgccct

SEQ ID NO: 1054 - DNA, 20 bp, Artificial
  20-mer unique DNA sequence
cagctcttcgttgcgcggtt

SEQ ID NO: 1055 - DNA, 20 bp, Artificial
  20-mer unique DNA sequence
aggggctcgtcttcttcgcg

SEQ ID NO: 1056 - DNA, 20 bp, Artificial
  20-mer unique DNA sequence
cactcacctccgcggcaagc

SEQ ID NO: 1057 - DNA, 20 bp, Artificial
  20-mer unique DNA sequence
agggtgaagtggtcggtcgg

SEQ ID NO: 1058 - DNA, 20 bp, Artificial
  20-mer unique DNA sequence
taagggtgagggcagggcga

SEQ ID NO: 1059 - DNA, 20 bp, Artificial
  20-mer unique DNA sequence
ggatccgcccaccctattcg

SEQ ID NO: 1060 - DNA, 20 bp, Artificial
  20-mer unique DNA sequence
ccgggggtgggcttagagga

SEQ ID NO: 1061 - DNA, 20 bp, Artificial
  20-mer unique DNA sequence
ggatcggactggcgtaggcg

SEQ ID NO: 1062 - DNA, 20 bp, Artificial
  20-mer unique DNA sequence
ggggctagggatggaccggt

SEQ ID NO: 1063 - DNA, 20 bp, Artificial
  20-mer unique DNA sequence
ccgcaaccgcacatccacag

SEQ ID NO: 1064 - DNA, 20 bp, Artificial
  20-mer unique DNA sequence
tttttccaagctccccgcct

SEQ ID NO: 1065 - DNA, 20 bp, Artificial
  20-mer unique DNA sequence
cgcattggtgttgagggggt

SEQ ID NO: 1066 - DNA, 20 bp, Artificial
  20-mer unique DNA sequence
gatccgcacagaacctcgcc

SEQ ID NO: 1067 - DNA, 20 bp, Artificial
  20-mer unique DNA sequence
tccatgacaagcgctccccg

SEQ ID NO: 1068 - DNA, 20 bp, Artificial
  20-mer unique DNA sequence
tgtagcaataacgcgcccgg

SEQ ID NO: 1069 - DNA, 20 bp, Artificial
  20-mer unique DNA sequence
cacgtgccgtagtcaggctt

SEQ ID NO: 1070 - DNA, 20 bp, Artificial
  20-mer unique DNA sequence
agggatgcgagggacacagg

SEQ ID NO: 1071 - DNA, 20 bp, Artificial
  20-mer unique DNA sequence
ggacgggtatgcttgttggc

SEQ ID NO: 1072 - DNA, 20 bp, Artificial
  20-mer unique DNA sequence
gggacgaaggccgaacaatg

SEQ ID NO: 1073 - DNA, 20 bp, Artificial
  20-mer unique DNA sequence
tacctgtgtgggcgtgggac

SEQ ID NO: 1074 - DNA, 20 bp, Artificial
  20-mer unique DNA sequence
gatgggcggaattgagggga

SEQ ID NO: 1075 - DNA, 20 bp, Artificial
  20-mer unique DNA sequence
gcagatgaggcgaccggaag

SEQ ID NO: 1076 - DNA, 20 bp, Artificial
  20-mer unique DNA sequence
ctgtgctgtgccccggtatg

SEQ ID NO: 1077 - DNA, 20 bp, Artificial
  20-mer unique DNA sequence
agtcgcgcgggtagaagggg

SEQ ID NO: 1078 - DNA, 20 bp, Artificial
  20-mer unique DNA sequence
cgggcggtgcaggtgttagt

SEQ ID NO: 1079 - DNA, 20 bp, Artificial
  20-mer unique DNA sequence
tgggtgatcttcgtgccgtc

SEQ ID NO: 1080 - DNA, 20 bp, Artificial
  20-mer unique DNA sequence
cgggcggtgcaggtgttagt

SEQ ID NO: 1081 - DNA, 20 bp, Artificial
  20-mer unique DNA sequence
tgggtgatcttcgtgccgtc

SEQ ID NO: 1082 - DNA, 20 bp, Artificial
  20-mer unique DNA sequence
gccccccgtgcatgaaagat

SEQ ID NO: 1083 - DNA, 20 bp, Artificial
  20-mer unique DNA sequence
tgccacaccaccgccatgag

SEQ ID NO: 1084 - DNA, 20 bp, Artificial
  20-mer unique DNA sequence
accacgccacctcgcccttc

SEQ ID NO: 1085 - DNA, 20 bp, Artificial
  20-mer unique DNA sequence
aaagggcggagggcggagat

SEQ ID NO: 1086 - DNA, 20 bp, Artificial
  20-mer unique DNA sequence
tttttggtcttccccgcacg

SEQ ID NO: 1087 - DNA, 20 bp, Artificial
  20-mer unique DNA sequence
ttaacgtcagccacccccgg

SEQ ID NO: 1088 - DNA, 20 bp, Artificial
  20-mer unique DNA sequence
gtacgaaggggcccgggaaa

SEQ ID NO: 1089 - DNA, 20 bp, Artificial
  20-mer unique DNA sequence
gcgggcggatttgtcttgaa

SEQ ID NO: 1090 - DNA, 20 bp, Artificial
  20-mer unique DNA sequence
cccaaatacccgaccgcaac

SEQ ID NO: 1091 - DNA, 20 bp, Artificial
  20-mer unique DNA sequence
cgtctcccctttcgcgcctt

SEQ ID NO: 1092 - DNA, 20 bp, Artificial
  20-mer unique DNA sequence
gatgggcgcttttcacgatt

SEQ ID NO: 1093 - DNA, 20 bp, Artificial
  20-mer unique DNA sequence
aactgatgataccgcggggg

SEQ ID NO: 1094 - DNA, 20 bp, Artificial
  20-mer unique DNA sequence
ggggtgacgtcgattggggt

SEQ ID NO: 1095 - DNA, 20 bp, Artificial
  20-mer unique DNA sequence
tcccgtcgtttctccacccc

SEQ ID NO: 1096 - DNA, 20 bp, Artificial
  20-mer unique DNA sequence
gccgcaccccccatgtactg

SEQ ID NO: 1097 - DNA, 20 bp, Artificial
  20-mer unique DNA sequence
gtggggcgctggaaaggatg

SEQ ID NO: 1098 - DNA, 20 bp, Artificial
  20-mer unique DNA sequence
ctccgctcctcccgtctcag

SEQ ID NO: 1099 - DNA, 20 bp, Artificial
  20-mer unique DNA sequence
cgcaaagacgcaaggagcag

SEQ ID NO: 1100 - DNA, 20 bp, Artificial
  20-mer unique DNA sequence
cttgcgctgcacgttctggg

SEQ ID NO: 1101 - DNA, 20 bp, Artificial
  20-mer unique DNA sequence
gcctgcatgaccgcgaataa

SEQ ID NO: 1102 - DNA, 20 bp, Artificial
  20-mer unique DNA sequence
ttcccgtcctgcgtttgcgt

SEQ ID NO: 1103 - DNA, 20 bp, Artificial
  20-mer unique DNA sequence
agggggaggatcttgggcat

SEQ ID NO: 1104 - DNA, 20 bp, Artificial
  20-mer unique DNA sequence
ggccctgtcgcgtagtttcg

SEQ ID NO: 1105 - DNA, 20 bp, Artificial
  20-mer unique DNA sequence
tgaaaaatgcgggggctggt

SEQ ID NO: 1106 - DNA, 20 bp, Artificial
  20-mer unique DNA sequence
gatatggcgcgtccgcagta

SEQ ID NO: 1107 - DNA, 20 bp, Artificial
  20-mer unique DNA sequence
atgggacccgtgtgagagca

SEQ ID NO: 1108 - DNA, 20 bp, Artificial
  20-mer unique DNA sequence
gtcgctcttatcgctggccc

SEQ ID NO: 1109 - DNA, 20 bp, Artificial
  20-mer unique DNA sequence
aattcttgccacctgcgggg

SEQ ID NO: 1110 - DNA, 20 bp, Artificial
  20-mer unique DNA sequence
ccaagggcgccaagttcaac

SEQ ID NO: 1111 - DNA, 20 bp, Artificial
  20-mer unique DNA sequence
ttgggtacctgcgccatccg

SEQ ID NO: 1112 - DNA, 20 bp, Artificial
  20-mer unique DNA sequence
tacggtggcaagggtggatt

SEQ ID NO: 1113 - DNA, 20 bp, Artificial
  20-mer unique DNA sequence
tcaatcccgcccagactcca

SEQ ID NO: 1114 - DNA, 20 bp, Artificial
  20-mer unique DNA sequence
gaaatgcgtgatggggcaaa

SEQ ID NO: 1115 - DNA, 20 bp, Artificial
  20-mer unique DNA sequence
ggctcgtgctggcggtttag

SEQ ID NO: 1116 - DNA, 20 bp, Artificial
  20-mer unique DNA sequence
cctccggtcgctgtcctcct

SEQ ID NO: 1117 - DNA, 20 bp, Artificial
  20-mer unique DNA sequence
ctctttccctcccctgccat

SEQ ID NO: 1118 - DNA, 20 bp, Artificial
  20-mer unique DNA sequence
tcccgggcgtgcacactttc

SEQ ID NO: 1119 - DNA, 20 bp, Artificial
  20-mer unique DNA sequence
gagccggcctttggtatccc

SEQ ID NO: 1120 - DNA, 20 bp, Artificial
  20-mer unique DNA sequence
agcacggatgggggtttttg

SEQ ID NO: 1121 - DNA, 20 bp, Artificial
  20-mer unique DNA sequence
gcggggggtgggagtgatgt

SEQ ID NO: 1122 - DNA, 20 bp, Artificial
  20-mer unique DNA sequence
ttgcacatctttccccgcca

SEQ ID NO: 1123 - DNA, 20 bp, Artificial
  20-mer unique DNA sequence
agggagggaagatgcgcgtt

SEQ ID NO: 1124 - DNA, 20 bp, Artificial
  20-mer unique DNA sequence
ttttggtcgttcggtcgctg

SEQ ID NO: 1125 - DNA, 20 bp, Artificial
  20-mer unique DNA sequence
acagcccacaaacagcccca

SEQ ID NO: 1126 - DNA, 20 bp, Artificial
  20-mer unique DNA sequence
accgcgcagaggcatttgtt

SEQ ID NO: 1127 - DNA, 20 bp, Artificial
  20-mer unique DNA sequence
tcggatgaggactgtggcgc

SEQ ID NO: 1128 - DNA, 20 bp, Artificial
  20-mer unique DNA sequence
gcgtggcggaggaattgcaa

SEQ ID NO: 1129 - DNA, 20 bp, Artificial
  20-mer unique DNA sequence
ggggaaggggaaaggccagg

SEQ ID NO: 1130 - DNA, 20 bp, Artificial
  20-mer unique DNA sequence
agccaacagcagacggaaca

SEQ ID NO: 1131 - DNA, 20 bp, Artificial
  20-mer unique DNA sequence
cacacccttcaccgcgcaca

SEQ ID NO: 1132 - DNA, 20 bp, Artificial
  20-mer unique DNA sequence
gacagggccataccgtggtt

SEQ ID NO: 1133 - DNA, 20 bp, Artificial
  20-mer unique DNA sequence
accgtctgtgacctacggct

SEQ ID NO: 1134 - DNA, 20 bp, Artificial
  20-mer unique DNA sequence
aaacgcggacgagcaaaccc

SEQ ID NO: 1135 - DNA, 20 bp, Artificial
  20-mer unique DNA sequence
gcgcgcaacaacgaaaccac

SEQ ID NO: 1136 - DNA, 20 bp, Artificial
  20-mer unique DNA sequence
agatcctgctccaacccccc

SEQ ID NO: 1137 - DNA, 20 bp, Artificial
  20-mer unique DNA sequence
gcatgggaaagttgggcgga

SEQ ID NO: 1138 - DNA, 20 bp, Artificial
  20-mer unique DNA sequence
gctggctggcggttggacac

SEQ ID NO: 1139 - DNA, 20 bp, Artificial
  20-mer unique DNA sequence
gtcccctatccgcggtcctt

SEQ ID NO: 1140 - DNA, 20 bp, Artificial
  20-mer unique DNA sequence
cttttgggcctgcgcgagtc

SEQ ID NO: 1141 - DNA, 20 bp, Artificial
  20-mer unique DNA sequence
gaccgggatgggggctgttc

SEQ ID NO: 1142 - DNA, 20 bp, Artificial
  20-mer unique DNA sequence
cgggctccccccataagaca

SEQ ID NO: 1143 - DNA, 20 bp, Artificial
  20-mer unique DNA sequence
cgctacgagtcactgcgttg

SEQ ID NO: 1144 - DNA, 20 bp, Artificial
  20-mer unique DNA sequence
tccgtcgccccaacaatgat

SEQ ID NO: 1145 - DNA, 20 bp, Artificial
  20-mer unique DNA sequence
ttcctcagcccctcctcgtg

SEQ ID NO: 1146 - DNA, 20 bp, Artificial
  20-mer unique DNA sequence
ccgcactcccttaccgcacc

SEQ ID NO: 1147 - DNA, 20 bp, Artificial
  20-mer unique DNA sequence
ccacgcacacaaaggcacgg

SEQ ID NO: 1148 - DNA, 20 bp, Artificial
  20-mer unique DNA sequence
tattaagccccgaagccgcc

SEQ ID NO: 1149 - DNA, 20 bp, Artificial
  20-mer unique DNA sequence
ttccccagcaaagtcacccc

SEQ ID NO: 1150 - DNA, 20 bp, Artificial
  20-mer unique DNA sequence
atcagaatggcaaagggcga

SEQ ID NO: 1151 - DNA, 20 bp, Artificial
  20-mer unique DNA sequence
ttggcccgcttttacccgag

SEQ ID NO: 1152 - DNA, 20 bp, Artificial
  20-mer unique DNA sequence
cctggggagatggggtttgg

SEQ ID NO: 1153 - DNA, 20 bp, Artificial
  20-mer unique DNA sequence
atcaagaccccgcgcagaac

SEQ ID NO: 1154 - DNA, 20 bp, Artificial
  20-mer unique DNA sequence
tctctcgcctccacttgcca

SEQ ID NO: 1155 - DNA, 20 bp, Artificial
  20-mer unique DNA sequence
aggcgtaggcgagacaggga

SEQ ID NO: 1156 - DNA, 20 bp, Artificial
  20-mer unique DNA sequence
cggggggttaatcagcgtgc

SEQ ID NO: 1157 - DNA, 20 bp, Artificial
  20-mer unique DNA sequence
tctttttcatggtggcggcg

SEQ ID NO: 1158 - DNA, 20 bp, Artificial
  20-mer unique DNA sequence
gatggggcctttgtccgtgg

SEQ ID NO: 1159 - DNA, 20 bp, Artificial
  20-mer unique DNA sequence
cgttgcggccatgctgtttg

SEQ ID NO: 1160 - DNA, 20 bp, Artificial
  20-mer unique DNA sequence
aaacccgacccttccatccc

SEQ ID NO: 1161 - DNA, 20 bp, Artificial
  20-mer unique DNA sequence
tcccgccccttttgaagcct

SEQ ID NO: 1162 - DNA, 20 bp, Artificial
  20-mer unique DNA sequence
tgtgaacaagtagcccgcca

SEQ ID NO: 1163 - DNA, 20 bp, Artificial
  20-mer unique DNA sequence
gcgcgcacgatggatagagg

SEQ ID NO: 1164 - DNA, 20 bp, Artificial
  20-mer unique DNA sequence
ctgatgtggagagcggcgaa

SEQ ID NO: 1165 - DNA, 20 bp, Artificial
  20-mer unique DNA sequence
accccctcccgattgcttgt

SEQ ID NO: 1166 - DNA, 20 bp, Artificial
  20-mer unique DNA sequence
tttgtgatggggcgttttcg

SEQ ID NO: 1167 - DNA, 20 bp, Artificial
  20-mer unique DNA sequence
attccccccttgcgtatggc

SEQ ID NO: 1168 - DNA, 20 bp, Artificial
  20-mer unique DNA sequence
accgatgcgctcgctgagat

SEQ ID NO: 1169 - DNA, 20 bp, Artificial
  20-mer unique DNA sequence
tctccacctctttccgcggc

SEQ ID NO: 1170 - DNA, 20 bp, Artificial
  20-mer unique DNA sequence
gcgggttatgtggttgccga

SEQ ID NO: 1171 - DNA, 20 bp, Artificial
  20-mer unique DNA sequence
cgcccaccctcttgcctcag

SEQ ID NO: 1172 - DNA, 20 bp, Artificial
  20-mer unique DNA sequence
cccgtctcgccccaacctgt

SEQ ID NO: 1173 - DNA, 20 bp, Artificial
  20-mer unique DNA sequence
cgtccgtccgccccataagt

SEQ ID NO: 1174 - DNA, 20 bp, Artificial
  20-mer unique DNA sequence
cagaacgggcggacgagatg

SEQ ID NO: 1175 - DNA, 20 bp, Artificial
  20-mer unique DNA sequence
tgttattccgaagcgcgcag

SEQ ID NO: 1176 - DNA, 20 bp, Artificial
  20-mer unique DNA sequence
gcgcggcacgtaatccatca

SEQ ID NO: 1177 - DNA, 20 bp, Artificial
  20-mer unique DNA sequence
tcacctgttggcggcatcct

SEQ ID NO: 1178 - DNA, 20 bp, Artificial
  20-mer unique DNA sequence
actcgctcactgccccctgc

SEQ ID NO: 1179 - DNA, 20 bp, Artificial
  20-mer unique DNA sequence
ttccgccaccacacgaggct

SEQ ID NO: 1180 - DNA, 20 bp, Artificial
  20-mer unique DNA sequence
cccacccaataccagcgcca

SEQ ID NO: 1181 - DNA, 20 bp, Artificial
  20-mer unique DNA sequence
ggcaccactcacaccatcgc

SEQ ID NO: 1182 - DNA, 20 bp, Artificial
  20-mer unique DNA sequence
attctgcgggagagcttgcc

SEQ ID NO: 1183 - DNA, 20 bp, Artificial
  20-mer unique DNA sequence
ccatgccatctgagcccaaa

SEQ ID NO: 1184 - DNA, 20 bp, Artificial
  20-mer unique DNA sequence
ccgatactcaaagggcccgc

SEQ ID NO: 1185 - DNA, 20 bp, Artificial
  20-mer unique DNA sequence
cgggggtagtggttgccttg

SEQ ID NO: 1186 - DNA, 20 bp, Artificial
  20-mer unique DNA sequence
cagaacgcatccgcccgaac

SEQ ID NO: 1187 - DNA, 20 bp, Artificial
  20-mer unique DNA sequence
gactgcggtgggggggctaa

SEQ ID NO: 1188 - DNA, 20 bp, Artificial
  20-mer unique DNA sequence
ccaccgacaacgaccctcct

SEQ ID NO: 1189 - DNA, 20 bp, Artificial
  20-mer unique DNA sequence
cgtccgcaactcccttctcc

SEQ ID NO: 1190 - DNA, 20 bp, Artificial
  20-mer unique DNA sequence
aagcacctccaacatcggcc

SEQ ID NO: 1191 - DNA, 20 bp, Artificial
  20-mer unique DNA sequence
cagcgcaaacaacgggcaaa

SEQ ID NO: 1192 - DNA, 20 bp, Artificial
  20-mer unique DNA sequence
caccagcaaatcgccgcctc

SEQ ID NO: 1193 - DNA, 20 bp, Artificial
  20-mer unique DNA sequence
gcatgtaggcgggggtcgtc

SEQ ID NO: 1194 - DNA, 20 bp, Artificial
  20-mer unique DNA sequence
tcggtgagaagggcgtgagc

SEQ ID NO: 1195 - DNA, 20 bp, Artificial
  20-mer unique DNA sequence
gcgtacagcgggaatggcct

SEQ ID NO: 1196 - DNA, 20 bp, Artificial
  20-mer unique DNA sequence
ctgcgcggtatcgaggagtg

SEQ ID NO: 1197 - DNA, 20 bp, Artificial
  20-mer unique DNA sequence
acgaccgacgccactttgtg

SEQ ID NO: 1198 - DNA, 20 bp, Artificial
  20-mer unique DNA sequence
gccaacatgcaccaacccac

SEQ ID NO: 1199 - DNA, 20 bp, Artificial
  20-mer unique DNA sequence
tacatgttgcgcgtgggagc

SEQ ID NO: 1200 - DNA, 20 bp, Artificial
  20-mer unique DNA sequence
tctgcaacgctcccgacatc

SEQ ID NO: 1201 - DNA, 20 bp, Artificial
  20-mer unique DNA sequence
gctcggtaggcgggtttgcc

SEQ ID NO: 1202 - DNA, 20 bp, Artificial
  20-mer unique DNA sequence
ctacccccgccagcaaatcc

SEQ ID NO: 1203 - DNA, 20 bp, Artificial
  20-mer unique DNA sequence
tcgcataggccactgagtcc

SEQ ID NO: 1204 - DNA, 20 bp, Artificial
  20-mer unique DNA sequence
aaacggaactcttcgcccgc

SEQ ID NO: 1205 - DNA, 20 bp, Artificial
  20-mer unique DNA sequence
ctgcgcgactcccctcgaac

SEQ ID NO: 1206 - DNA, 20 bp, Artificial
  20-mer unique DNA sequence
ggaccttcatgccctctgcc

SEQ ID NO: 1207 - DNA, 20 bp, Artificial
  20-mer unique DNA sequence
ctcgcctcatagcccaaccc

SEQ ID NO: 1208 - DNA, 20 bp, Artificial
  20-mer unique DNA sequence
agcgtactcgctgacagtcc

SEQ ID NO: 1209 - DNA, 20 bp, Artificial
  20-mer unique DNA sequence
ttacctagggccccgggaaa

SEQ ID NO: 1210 - DNA, 20 bp, Artificial
  20-mer unique DNA sequence
gtctcgccccgttgtccctt

SEQ ID NO: 1211 - DNA, 20 bp, Artificial
  20-mer unique DNA sequence
gtaacactatgcccaccccg

SEQ ID NO: 1212 - DNA, 20 bp, Artificial
  20-mer unique DNA sequence
gcggttctggggctgcattg

SEQ ID NO: 1213 - DNA, 20 bp, Artificial
  20-mer unique DNA sequence
gtcgggggtgagagatggcg

SEQ ID NO: 1214 - DNA, 20 bp, Artificial
  20-mer unique DNA sequence
tggggatgcggatgaaagcc

SEQ ID NO: 1215 - DNA, 20 bp, Artificial
  20-mer unique DNA sequence
ggcttggtgaatctggcggc

SEQ ID NO: 1216 - DNA, 20 bp, Artificial
  20-mer unique DNA sequence
agggataaggcgggggtgag

SEQ ID NO: 1217 - DNA, 20 bp, Artificial
  20-mer unique DNA sequence
tcgcccgcctcccactgtac

SEQ ID NO: 1218 - DNA, 20 bp, Artificial
  20-mer unique DNA sequence
agcctccgagatagccaagc

SEQ ID NO: 1219 - DNA, 20 bp, Artificial
  20-mer unique DNA sequence
ggcccgctcccacaaaaata

SEQ ID NO: 1220 - DNA, 20 bp, Artificial
  20-mer unique DNA sequence
acgcatctaacccccgcaag

SEQ ID NO: 1221 - DNA, 20 bp, Artificial
  20-mer unique DNA sequence
gcacggtttttgatgggccc

SEQ ID NO: 1222 - DNA, 20 bp, Artificial
  20-mer unique DNA sequence
gtcccgtcccaattacccca

SEQ ID NO: 1223 - DNA, 20 bp, Artificial
  20-mer unique DNA sequence
gagccaccgcccgacatgac

SEQ ID NO: 1224 - DNA, 20 bp, Artificial
  20-mer unique DNA sequence
tatcttctcgcccctccgcc

SEQ ID NO: 1225 - DNA, 20 bp, Artificial
  20-mer unique DNA sequence
cgagtttatccaaggccccg

SEQ ID NO: 1226 - DNA, 20 bp, Artificial
  20-mer unique DNA sequence
cccaccgccttgcatgtctg

SEQ ID NO: 1227 - DNA, 20 bp, Artificial
  20-mer unique DNA sequence
gtcaaccaatccagcggcgt

SEQ ID NO: 1228 - DNA, 20 bp, Artificial
  20-mer unique DNA sequence
tcgcgtcccacttctgcacg

SEQ ID NO: 1229 - DNA, 20 bp, Artificial
  20-mer unique DNA sequence
tcagcccatagaacgccgcg

SEQ ID NO: 1230 - DNA, 20 bp, Artificial
  20-mer unique DNA sequence
gcgggaaggagacacgggaa

SEQ ID NO: 1231 - DNA, 20 bp, Artificial
  20-mer unique DNA sequence
attggttgactttgcgcccc

SEQ ID NO: 1232 - DNA, 20 bp, Artificial
  20-mer unique DNA sequence
gcctacccgtgcaaccctgt

SEQ ID NO: 1233 - DNA, 20 bp, Artificial
  20-mer unique DNA sequence
cgtcgttgcatagccctccc

SEQ ID NO: 1234 - DNA, 20 bp, Artificial
  20-mer unique DNA sequence
ctccccgctcttcgtcacct

SEQ ID NO: 1235 - DNA, 20 bp, Artificial
  20-mer unique DNA sequence
aacgtgatgtgtgggcctgc

SEQ ID NO: 1236 - DNA, 20 bp, Artificial
  20-mer unique DNA sequence
cccaccggcgttccactcat

SEQ ID NO: 1237 - DNA, 20 bp, Artificial
  20-mer unique DNA sequence
ggccgcgtctttcctctttg

SEQ ID NO: 1238 - DNA, 20 bp, Artificial
  20-mer unique DNA sequence
ccccgcgctcatctattccg

SEQ ID NO: 1239 - DNA, 20 bp, Artificial
  20-mer unique DNA sequence
cgctgtgtcgtgctccctgc

SEQ ID NO: 1240 - DNA, 20 bp, Artificial
  20-mer unique DNA sequence
cccagctttgcacaccgaga

SEQ ID NO: 1241 - DNA, 20 bp, Artificial
  20-mer unique DNA sequence
cctagccacatccccccgag

SEQ ID NO: 1242 - DNA, 20 bp, Artificial
  20-mer unique DNA sequence
gccgtccgtcccatccgtaa

SEQ ID NO: 1243 - DNA, 20 bp, Artificial
  20-mer unique DNA sequence
ctaccgaatcacccgccccc

SEQ ID NO: 1244 - DNA, 20 bp, Artificial
  20-mer unique DNA sequence
tttgatttggcacctcggcg

SEQ ID NO: 1245 - DNA, 20 bp, Artificial
  20-mer unique DNA sequence
acatcggggggtggcctagg

SEQ ID NO: 1246 - DNA, 20 bp, Artificial
  20-mer unique DNA sequence
gaagaaacacccggcgaccc

SEQ ID NO: 1247 - DNA, 20 bp, Artificial
  20-mer unique DNA sequence
tttttgctggcgcttcatgg

SEQ ID NO: 1248 - DNA, 20 bp, Artificial
  20-mer unique DNA sequence
tgaggaggggattgcggaag

SEQ ID NO: 1249 - DNA, 20 bp, Artificial
  20-mer unique DNA sequence
agcgcgccgtgattgtaagc

SEQ ID NO: 1250 - DNA, 20 bp, Artificial
  20-mer unique DNA sequence
tcctccccgaccgcatctga

SEQ ID NO: 1251 - DNA, 20 bp, Artificial
  20-mer unique DNA sequence
gggggcgggatccttctgtg

SEQ ID NO: 1252 - DNA, 20 bp, Artificial
  20-mer unique DNA sequence
tcaagcagttccctccccgc

SEQ ID NO: 1253 - DNA, 20 bp, Artificial
  20-mer unique DNA sequence
acggcgatgaggagcggagt

SEQ ID NO: 1254 - DNA, 20 bp, Artificial
  20-mer unique DNA sequence
agccccccactacccgcctt

SEQ ID NO: 1255 - DNA, 20 bp, Artificial
  20-mer unique DNA sequence
cgccacccgcttatcacaca

SEQ ID NO: 1256 - DNA, 20 bp, Artificial
  20-mer unique DNA sequence
tcggagcgaccgtgactact

SEQ ID NO: 1257 - DNA, 20 bp, Artificial
  20-mer unique DNA sequence
aatctgcgaaatcaggcggg

SEQ ID NO: 1258 - DNA, 20 bp, Artificial
  20-mer unique DNA sequence
tgctaagtgctgtctccggt

SEQ ID NO: 1259 - DNA, 20 bp, Artificial
  20-mer unique DNA sequence
gacccctaaccgccgagcac

SEQ ID NO: 1260 - DNA, 20 bp, Artificial
  20-mer unique DNA sequence
cagcatgcgcgttcccctaa

SEQ ID NO: 1261 - DNA, 20 bp, Artificial
  20-mer unique DNA sequence
gttgcgggcttcgggttcct

SEQ ID NO: 1262 - DNA, 20 bp, Artificial
  20-mer unique DNA sequence
tgtctaccgcgagatctgcg

SEQ ID NO: 1263 - DNA, 20 bp, Artificial
  20-mer unique DNA sequence
cggatgctacgggtttcggt

SEQ ID NO: 1264 - DNA, 20 bp, Artificial
  20-mer unique DNA sequence
gggcagcgggtgaacatcag

SEQ ID NO: 1265 - DNA, 20 bp, Artificial
  20-mer unique DNA sequence
ttcctgtcttgcctccgcca

SEQ ID NO: 1266 - DNA, 20 bp, Artificial
  20-mer unique DNA sequence
ggaaagggggaggacgaccg

SEQ ID NO: 1267 - DNA, 20 bp, Artificial
  20-mer unique DNA sequence
tagccttccccatcgcctcg

SEQ ID NO: 1268 - DNA, 20 bp, Artificial
  20-mer unique DNA sequence
tcgtctccgctccccctgaa

SEQ ID NO: 1269 - DNA, 20 bp, Artificial
  20-mer unique DNA sequence
tgccggttcgcgtactgttc

SEQ ID NO: 1270 - DNA, 20 bp, Artificial
  20-mer unique DNA sequence
tgcaaaatagccgcggaatg

SEQ ID NO: 1271 - DNA, 20 bp, Artificial
  20-mer unique DNA sequence
caaatcgaaaggcccgcaga

SEQ ID NO: 1272 - DNA, 20 bp, Artificial
  20-mer unique DNA sequence
cccggcccttcgcagacata

SEQ ID NO: 1273 - DNA, 20 bp, Artificial
  20-mer unique DNA sequence
aataccgcccttccgacccg

SEQ ID NO: 1274 - DNA, 20 bp, Artificial
  20-mer unique DNA sequence
cactttccctcgcgtttgag

SEQ ID NO: 1275 - DNA, 20 bp, Artificial
  20-mer unique DNA sequence
aaccgcgaccctttcgatcg

SEQ ID NO: 1276 - DNA, 20 bp, Artificial
  20-mer unique DNA sequence
gtgccacggtttttgcggtg

SEQ ID NO: 1277 - DNA, 20 bp, Artificial
  20-mer unique DNA sequence
tctcccggccttgctcattc

SEQ ID NO: 1278 - DNA, 20 bp, Artificial
  20-mer unique DNA sequence
ttcgtgcggctggggtatcg

SEQ ID NO: 1279 - DNA, 20 bp, Artificial
  20-mer unique DNA sequence
aaacaccctgcgaccccgtc

SEQ ID NO: 1280 - DNA, 20 bp, Artificial
  20-mer unique DNA sequence
cggaggattgacgtggtttt

SEQ ID NO: 1281 - DNA, 20 bp, Artificial
  20-mer unique DNA sequence
ctatgccgcccaatctccga

SEQ ID NO: 1282 - DNA, 20 bp, Artificial
  20-mer unique DNA sequence
ccgatacgccttgtccctgc

SEQ ID NO: 1283 - DNA, 20 bp, Artificial
  20-mer unique DNA sequence
ccttccgccgccttgcttag

SEQ ID NO: 1284 - DNA, 20 bp, Artificial
  20-mer unique DNA sequence
cgtcgtaccctcaaaccgcc

SEQ ID NO: 1285 - DNA, 20 bp, Artificial
  20-mer unique DNA sequence
ttcggatcgggaggttggga

SEQ ID NO: 1286 - DNA, 20 bp, Artificial
  20-mer unique DNA sequence
caggagggtggatggctacg

SEQ ID NO: 1287 - DNA, 20 bp, Artificial
  20-mer unique DNA sequence
tgctactcccctcgcccctc

SEQ ID NO: 1288 - DNA, 20 bp, Artificial
  20-mer unique DNA sequence
cgtctatatccaggccggcg

SEQ ID NO: 1289 - DNA, 20 bp, Artificial
  20-mer unique DNA sequence
tgtctctcgctgcccaatcg

SEQ ID NO: 1290 - DNA, 20 bp, Artificial
  20-mer unique DNA sequence
agccccttattttgcccccg

SEQ ID NO: 1291 - DNA, 20 bp, Artificial
  20-mer unique DNA sequence
aggtaaaaacggcgggggac

SEQ ID NO: 1292 - DNA, 20 bp, Artificial
  20-mer unique DNA sequence
atgcatatgtccgccgccac

SEQ ID NO: 1293 - DNA, 20 bp, Artificial
  20-mer unique DNA sequence
gcctggttgcggttggtaca

SEQ ID NO: 1294 - DNA, 20 bp, Artificial
  20-mer unique DNA sequence
tacaccccgcatccaacctc

SEQ ID NO: 1295 - DNA, 20 bp, Artificial
  20-mer unique DNA sequence
aatcaggggggcgaaggtgt

SEQ ID NO: 1296 - DNA, 20 bp, Artificial
  20-mer unique DNA sequence
cataaccggctgctccccta

SEQ ID NO: 1297 - DNA, 20 bp, Artificial
  20-mer unique DNA sequence
gcgagcagatttgggcacac

SEQ ID NO: 1298 - DNA, 20 bp, Artificial
  20-mer unique DNA sequence
cctaattggatgcgggggct

SEQ ID NO: 1299 - DNA, 20 bp, Artificial
  20-mer unique DNA sequence
tgcatcccctttaatgtcgc

SEQ ID NO: 1300 - DNA, 20 bp, Artificial
  20-mer unique DNA sequence
gtcatcttggttccgcgccg

SEQ ID NO: 1301 - DNA, 20 bp, Artificial
  20-mer unique DNA sequence
gacgggggtgcgacaaatgg

SEQ ID NO: 1302 - DNA, 20 bp, Artificial
  20-mer unique DNA sequence
ccccgaaaaggatgctgcgt

SEQ ID NO: 1303 - DNA, 20 bp, Artificial
  20-mer unique DNA sequence
tccgggctcaccaaactgtg

SEQ ID NO: 1304 - DNA, 20 bp, Artificial
  20-mer unique DNA sequence
tggcgcgtcaggtagcatgg

SEQ ID NO: 1305 - DNA, 20 bp, Artificial
  20-mer unique DNA sequence
agagaaaccacgcccccacc

SEQ ID NO: 1306 - DNA, 20 bp, Artificial
  20-mer unique DNA sequence
tgaggtcgcaagggagacgg

SEQ ID NO: 1307 - DNA, 20 bp, Artificial
  20-mer unique DNA sequence
cagccccaatccaacgaaca

SEQ ID NO: 1308 - DNA, 20 bp, Artificial
  20-mer unique DNA sequence
ggggttaacgggagagggga

SEQ ID NO: 1309 - DNA, 20 bp, Artificial
  20-mer unique DNA sequence
ggcgcgaggaatggtggtta

SEQ ID NO: 1310 - DNA, 20 bp, Artificial
  20-mer unique DNA sequence
cggagattcgcaacgggctg

SEQ ID NO: 1311 - DNA, 20 bp, Artificial
  20-mer unique DNA sequence
acgccccgccgcagactaac

SEQ ID NO: 1312 - DNA, 20 bp, Artificial
  20-mer unique DNA sequence
ccggggagggagagacagct

SEQ ID NO: 1313 - DNA, 20 bp, Artificial
  20-mer unique DNA sequence
ccgattgggtttggcacagc

SEQ ID NO: 1314 - DNA, 20 bp, Artificial
  20-mer unique DNA sequence
agtatagggtgcgcgggcca

SEQ ID NO: 1315 - DNA, 20 bp, Artificial
  20-mer unique DNA sequence
ccctcagaaagccctcgcga

SEQ ID NO: 1316 - DNA, 20 bp, Artificial
  20-mer unique DNA sequence
gttgcgagggagtggtggga

SEQ ID NO: 1317 - DNA, 20 bp, Artificial
  20-mer unique DNA sequence
cctggagaacgcgcaacacg

SEQ ID NO: 1318 - DNA, 20 bp, Artificial
  20-mer unique DNA sequence
gctcccgtggtgtgacatct

SEQ ID NO: 1319 - DNA, 20 bp, Artificial
  20-mer unique DNA sequence
cagcctgggaccgtttcaca

SEQ ID NO: 1320 - DNA, 20 bp, Artificial
  20-mer unique DNA sequence
aggactcaaaagaacggggg

SEQ ID NO: 1321 - DNA, 20 bp, Artificial
  20-mer unique DNA sequence
ttacggatggggcggagatg

SEQ ID NO: 1322 - DNA, 20 bp, Artificial
  20-mer unique DNA sequence
cttctctgtcctgcgggggg

SEQ ID NO: 1323 - DNA, 20 bp, Artificial
  20-mer unique DNA sequence
agcgggagcaggtctatggt

SEQ ID NO: 1324 - DNA, 20 bp, Artificial
  20-mer unique DNA sequence
aacccaccgcacgtcaaaca

SEQ ID NO: 1325 - DNA, 20 bp, Artificial
  20-mer unique DNA sequence
gccctgccacaacctccctt

SEQ ID NO: 1326 - DNA, 20 bp, Artificial
  20-mer unique DNA sequence
cacggcgtgcgctagtctaa

SEQ ID NO: 1327 - DNA, 20 bp, Artificial
  20-mer unique DNA sequence
acgggtccctggggtctaaa

SEQ ID NO: 1328 - DNA, 20 bp, Artificial
  20-mer unique DNA sequence
aaaaaggggatcgcggcaaa

SEQ ID NO: 1329 - DNA, 20 bp, Artificial
  20-mer unique DNA sequence
cggggatgcgtgccaaacat

SEQ ID NO: 1330 - DNA, 20 bp, Artificial
  20-mer unique DNA sequence
tttcggtggcaggtcgttga

SEQ ID NO: 1331 - DNA, 20 bp, Artificial
  20-mer unique DNA sequence
tctcatttgccgctcctgcg

SEQ ID NO: 1332 - DNA, 20 bp, Artificial
  20-mer unique DNA sequence
gggcgtctctggggggtcaa

SEQ ID NO: 1333 - DNA, 20 bp, Artificial
  20-mer unique DNA sequence
ctggattgcgtgggcctttc

SEQ ID NO: 1334 - DNA, 20 bp, Artificial
  20-mer unique DNA sequence
acgcctccggtttccacaat

SEQ ID NO: 1335 - DNA, 20 bp, Artificial
  20-mer unique DNA sequence
cctcctagccatgcccccga

SEQ ID NO: 1336 - DNA, 20 bp, Artificial
  20-mer unique DNA sequence
acttggggtgtcggccgctt

SEQ ID NO: 1337 - DNA, 20 bp, Artificial
  20-mer unique DNA sequence
gctggcactgacgggctgat

SEQ ID NO: 1338 - DNA, 20 bp, Artificial
  20-mer unique DNA sequence
acacgcgcctgtcgcctaaa

SEQ ID NO: 1339 - DNA, 20 bp, Artificial
  20-mer unique DNA sequence
gggaactaaccaccgcgagc

SEQ ID NO: 1340 - DNA, 20 bp, Artificial
  20-mer unique DNA sequence
cggtggcgcctggattatgg

SEQ ID NO: 1341 - DNA, 20 bp, Artificial
  20-mer unique DNA sequence
acaaacgcgatcggaaccct

SEQ ID NO: 1342 - DNA, 20 bp, Artificial
  20-mer unique DNA sequence
tggtcatcgttctcgctcgg

SEQ ID NO: 1343 - DNA, 20 bp, Artificial
  20-mer unique DNA sequence
acaacgccccttacccctgg

SEQ ID NO: 1344 - DNA, 20 bp, Artificial
  20-mer unique DNA sequence
ccttatcaccgcccgacgaa

SEQ ID NO: 1345 - DNA, 20 bp, Artificial
  20-mer unique DNA sequence
ccgcgcaccaataaggcaac

SEQ ID NO: 1346 - DNA, 20 bp, Artificial
  20-mer unique DNA sequence
gcgactgactatccaggcga

SEQ ID NO: 1347 - DNA, 20 bp, Artificial
  20-mer unique DNA sequence
acgaatggtgccctagtcgc

SEQ ID NO: 1348 - DNA, 20 bp, Artificial
  20-mer unique DNA sequence
cggagcgctcgtatgtgcca

SEQ ID NO: 1349 - DNA, 20 bp, Artificial
  20-mer unique DNA sequence
acgtagaccgtgggggcctt

SEQ ID NO: 1350 - DNA, 20 bp, Artificial
  20-mer unique DNA sequence
tcgctaaagcttggggggcc

SEQ ID NO: 1351 - DNA, 20 bp, Artificial
  20-mer unique DNA sequence
cgacacattccgcggctcac

SEQ ID NO: 1352 - DNA, 20 bp, Artificial
  20-mer unique DNA sequence
caagaccgtatcagcgccga

SEQ ID NO: 1353 - DNA, 20 bp, Artificial
  20-mer unique DNA sequence
actcaaatgccctcgccgtg

SEQ ID NO: 1354 - DNA, 20 bp, Artificial
  20-mer unique DNA sequence
cccggcccttgatgctatgt

SEQ ID NO: 1355 - DNA, 20 bp, Artificial
  20-mer unique DNA sequence
tcgttcgcccagcctatgcc

SEQ ID NO: 1356 - DNA, 20 bp, Artificial
  20-mer unique DNA sequence
taatacgaagcgccggcagg

SEQ ID NO: 1357 - DNA, 20 bp, Artificial
  20-mer unique DNA sequence
agccgtcaccacaaatcccg

SEQ ID NO: 1358 - DNA, 20 bp, Artificial
  20-mer unique DNA sequence
cccgcgatggttaggcaagt

SEQ ID NO: 1359 - DNA, 20 bp, Artificial
  20-mer unique DNA sequence
cctctccgcatccccctctc

SEQ ID NO: 1360 - DNA, 20 bp, Artificial
  20-mer unique DNA sequence
atgactgatttgggccccct

SEQ ID NO: 1361 - DNA, 20 bp, Artificial
  20-mer unique DNA sequence
atcccaaacgcctagacgcg

SEQ ID NO: 1362 - DNA, 20 bp, Artificial
  20-mer unique DNA sequence
tccacctccgcaccctttcc

SEQ ID NO: 1363 - DNA, 20 bp, Artificial
  20-mer unique DNA sequence
tagcagacggatggggaccg

SEQ ID NO: 1364 - DNA, 20 bp, Artificial
  20-mer unique DNA sequence
caatcgaaagggggacgcgt

SEQ ID NO: 1365 - DNA, 20 bp, Artificial
  20-mer unique DNA sequence
gagggccgtgtggatcgtca

SEQ ID NO: 1366 - DNA, 20 bp, Artificial
  20-mer unique DNA sequence
ttcatgtgccctcgtcgctt

SEQ ID NO: 1367 - DNA, 20 bp, Artificial
  20-mer unique DNA sequence
gtgtggaggcgcggatctgc

SEQ ID NO: 1368 - DNA, 20 bp, Artificial
  20-mer unique DNA sequence
gatggatggggtgggggttg

SEQ ID NO: 1369 - DNA, 20 bp, Artificial
  20-mer unique DNA sequence
tttctcgcatccgccaaggg

SEQ ID NO: 1370 - DNA, 20 bp, Artificial
  20-mer unique DNA sequence
gcacggcttttgggcatcat

SEQ ID NO: 1371 - DNA, 20 bp, Artificial
  20-mer unique DNA sequence
cggggctgaaagagggtaac

SEQ ID NO: 1372 - DNA, 20 bp, Artificial
  20-mer unique DNA sequence
cctcctccggtcatgccaaa

SEQ ID NO: 1373 - DNA, 20 bp, Artificial
  20-mer unique DNA sequence
gtggcccgtgttcgcttggt

SEQ ID NO: 1374 - DNA, 20 bp, Artificial
  20-mer unique DNA sequence
agtgacgtaggtggccgggt

SEQ ID NO: 1375 - DNA, 20 bp, Artificial
  20-mer unique DNA sequence
cagcgcttatgaccgggtac

SEQ ID NO: 1376 - DNA, 20 bp, Artificial
  20-mer unique DNA sequence
tacgtcccaaacccacccgg

SEQ ID NO: 1377 - DNA, 20 bp, Artificial
  20-mer unique DNA sequence
gtcctgtcgcaatcgcctct

SEQ ID NO: 1378 - DNA, 20 bp, Artificial
  20-mer unique DNA sequence
cgtccgcaaagaatccccaa

SEQ ID NO: 1379 - DNA, 20 bp, Artificial
  20-mer unique DNA sequence
atcaatcgacgggccctcac

SEQ ID NO: 1380 - DNA, 20 bp, Artificial
  20-mer unique DNA sequence
ttcccttagcgccaaccccg

SEQ ID NO: 1381 - DNA, 20 bp, Artificial
  20-mer unique DNA sequence
aacgagacaaatggggcggt

SEQ ID NO: 1382 - DNA, 20 bp, Artificial
  20-mer unique DNA sequence
ggaggtaatttggggcgcga

SEQ ID NO: 1383 - DNA, 20 bp, Artificial
  20-mer unique DNA sequence
atccggtggtgcgcagttct

SEQ ID NO: 1384 - DNA, 20 bp, Artificial
  20-mer unique DNA sequence
tcggtttttgggcgtgaggt

SEQ ID NO: 1385 - DNA, 20 bp, Artificial
  20-mer unique DNA sequence
ttcccagtcacaggctgtgt

SEQ ID NO: 1386 - DNA, 20 bp, Artificial
  20-mer unique DNA sequence
gcgtccatcggtttcccctc

SEQ ID NO: 1387 - DNA, 20 bp, Artificial
  20-mer unique DNA sequence
gaacatccgcaccccactcc

SEQ ID NO: 1388 - DNA, 20 bp, Artificial
  20-mer unique DNA sequence
gatccttgcggctccttcgg

SEQ ID NO: 1389 - DNA, 20 bp, Artificial
  20-mer unique DNA sequence
cggggtaggttggtgatgcg

SEQ ID NO: 1390 - DNA, 20 bp, Artificial
  20-mer unique DNA sequence
acatcgttcccccagcccat

SEQ ID NO: 1391 - DNA, 20 bp, Artificial
  20-mer unique DNA sequence
tgcgctgaactggctgggta

SEQ ID NO: 1392 - DNA, 20 bp, Artificial
  20-mer unique DNA sequence
cattagtcccggcgccttcc

SEQ ID NO: 1393 - DNA, 20 bp, Artificial
  20-mer unique DNA sequence
atttgccttcctccaccccg

SEQ ID NO: 1394 - DNA, 20 bp, Artificial
  20-mer unique DNA sequence
agggcacgcacaggaagatg

SEQ ID NO: 1395 - DNA, 20 bp, Artificial
  20-mer unique DNA sequence
aacccaacgcgcccctagag

SEQ ID NO: 1396 - DNA, 20 bp, Artificial
  20-mer unique DNA sequence
ctggtggaaattggggggcc

SEQ ID NO: 1397 - DNA, 20 bp, Artificial
  20-mer unique DNA sequence
cgagcgaaacggcgacaaac

SEQ ID NO: 1398 - DNA, 20 bp, Artificial
  20-mer unique DNA sequence
aattgagcgcccccgttgtg

SEQ ID NO: 1399 - DNA, 20 bp, Artificial
  20-mer unique DNA sequence
tgatccggcaacagaacgca

SEQ ID NO: 1400 - DNA, 20 bp, Artificial
  20-mer unique DNA sequence
gaaaacaccgccctgccgat

SEQ ID NO: 1401 - DNA, 20 bp, Artificial
  20-mer unique DNA sequence
caaacatacccgcgcgccac

SEQ ID NO: 1402 - DNA, 20 bp, Artificial
  20-mer unique DNA sequence
gcctcccgtccacacaccga

SEQ ID NO: 1403 - DNA, 20 bp, Artificial
  20-mer unique DNA sequence
ggggtggggatcatggttca

SEQ ID NO: 1404 - DNA, 20 bp, Artificial
  20-mer unique DNA sequence
actcccctgctgcccgcctg

SEQ ID NO: 1405 - DNA, 20 bp, Artificial
  20-mer unique DNA sequence
aggggggttatggggtgcga

SEQ ID NO: 1406 - DNA, 20 bp, Artificial
  20-mer unique DNA sequence
aacttcgccctatcgcccgc

SEQ ID NO: 1407 - DNA, 20 bp, Artificial
  20-mer unique DNA sequence
gcacgagggatgaagcgacc

SEQ ID NO: 1408 - DNA, 20 bp, Artificial
  20-mer unique DNA sequence
tcgggggtgtgcggttatcc

SEQ ID NO: 1409 - DNA, 20 bp, Artificial
  20-mer unique DNA sequence
cctctgggcttgtgcactgg

SEQ ID NO: 1410 - DNA, 20 bp, Artificial
  20-mer unique DNA sequence
tcagagagggctagcgggcg

SEQ ID NO: 1411 - DNA, 20 bp, Artificial
  20-mer unique DNA sequence
gttccccggcttgcatgtcg

SEQ ID NO: 1412 - DNA, 20 bp, Artificial
  20-mer unique DNA sequence
tctcccattgcaccgaccac

SEQ ID NO: 1413 - DNA, 20 bp, Artificial
  20-mer unique DNA sequence
cgcgacaaacacgagccaag

SEQ ID NO: 1414 - DNA, 20 bp, Artificial
  20-mer unique DNA sequence
tggcccgcaaaactcctgtc

SEQ ID NO: 1415 - DNA, 20 bp, Artificial
  20-mer unique DNA sequence
attgaggattggcgggtggc

SEQ ID NO: 1416 - DNA, 20 bp, Artificial
  20-mer unique DNA sequence
cccgtttcccactcccgtca

SEQ ID NO: 1417 - DNA, 20 bp, Artificial
  20-mer unique DNA sequence
cacccagcaccattccgcag

SEQ ID NO: 1418 - DNA, 20 bp, Artificial
  20-mer unique DNA sequence
gtgttgtcgggcggttccag

SEQ ID NO: 1419 - DNA, 20 bp, Artificial
  20-mer unique DNA sequence
ggatcctgcgcccctggata

SEQ ID NO: 1420 - DNA, 20 bp, Artificial
  20-mer unique DNA sequence
acataccgcggcagtctgaa

SEQ ID NO: 1421 - DNA, 20 bp, Artificial
  20-mer unique DNA sequence
gtccgagaatcggccagcta

SEQ ID NO: 1422 - DNA, 20 bp, Artificial
  20-mer unique DNA sequence
cccggttgctccatcgactg

SEQ ID NO: 1423 - DNA, 20 bp, Artificial
  20-mer unique DNA sequence
gccggtttggcccttccagt

SEQ ID NO: 1424 - DNA, 20 bp, Artificial
  20-mer unique DNA sequence
agactgggtgagcgcaacgg

SEQ ID NO: 1425 - DNA, 20 bp, Artificial
  20-mer unique DNA sequence
aagccccccctgtatgtccg

SEQ ID NO: 1426 - DNA, 20 bp, Artificial
  20-mer unique DNA sequence
ttcggttccaggcggttcgt

SEQ ID NO: 1427 - DNA, 20 bp, Artificial
  20-mer unique DNA sequence
cacgaggaacgccagccaca

SEQ ID NO: 1428 - DNA, 20 bp, Artificial
  20-mer unique DNA sequence
acctgtgatcagtgcgccac

SEQ ID NO: 1429 - DNA, 20 bp, Artificial
  20-mer unique DNA sequence
cgctgcggcatagttaaccc

SEQ ID NO: 1430 - DNA, 20 bp, Artificial
  20-mer unique DNA sequence
gcacagctgataggccccgt

SEQ ID NO: 1431 - DNA, 20 bp, Artificial
  20-mer unique DNA sequence
cccagcatactgcaacggca

SEQ ID NO: 1432 - DNA, 20 bp, Artificial
  20-mer unique DNA sequence
ggcacgtacgtcatgcacac

SEQ ID NO: 1433 - DNA, 20 bp, Artificial
  20-mer unique DNA sequence
actgtcggaagtccacgctt

SEQ ID NO: 1434 - DNA, 20 bp, Artificial
  20-mer unique DNA sequence
cgttgtggagcggtatgcgg

SEQ ID NO: 1435 - DNA, 20 bp, Artificial
  20-mer unique DNA sequence
cgtaggggggagtgggcgat

SEQ ID NO: 1436 - DNA, 20 bp, Artificial
  20-mer unique DNA sequence
gcgatggattggcgagggct

SEQ ID NO: 1437 - DNA, 20 bp, Artificial
  20-mer unique DNA sequence
tccaacatatcccgcagccg

SEQ ID NO: 1438 - DNA, 20 bp, Artificial
  20-mer unique DNA sequence
gcgaaccgagggaaggcatc

SEQ ID NO: 1439 - DNA, 20 bp, Artificial
  20-mer unique DNA sequence
ccaaatcctcaaagcgggcc

SEQ ID NO: 1440 - DNA, 20 bp, Artificial
  20-mer unique DNA sequence
ccgcgctgccacactcatac

SEQ ID NO: 1441 - DNA, 20 bp, Artificial
  20-mer unique DNA sequence
acgcggggggaggaaacatg

SEQ ID NO: 1442 - DNA, 20 bp, Artificial
  20-mer unique DNA sequence
ccattgtgggcccgcttcag

SEQ ID NO: 1443 - DNA, 20 bp, Artificial
  20-mer unique DNA sequence
gaaggatcaggacggggggg

SEQ ID NO: 1444 - DNA, 20 bp, Artificial
  20-mer unique DNA sequence
tgactcgggggtgctgctta

SEQ ID NO: 1445 - DNA, 20 bp, Artificial
  20-mer unique DNA sequence
ccagagcaaaacgacaggcg

SEQ ID NO: 1446 - DNA, 20 bp, Artificial
  20-mer unique DNA sequence
cgtaaagggccggcaatagg

SEQ ID NO: 1447 - DNA, 20 bp, Artificial
  20-mer unique DNA sequence
tcaactcctccaagccacgc

SEQ ID NO: 1448 - DNA, 20 bp, Artificial
  20-mer unique DNA sequence
agccgatgcacttttccccc

SEQ ID NO: 1449 - DNA, 20 bp, Artificial
  20-mer unique DNA sequence
gtcgacatcccacgcccaac

SEQ ID NO: 1450 - DNA, 20 bp, Artificial
  20-mer unique DNA sequence
actgtagaccaaccgtggcg

SEQ ID NO: 1451 - DNA, 20 bp, Artificial
  20-mer unique DNA sequence
ggctcagatcggtgccatgt

SEQ ID NO: 1452 - DNA, 20 bp, Artificial
  20-mer unique DNA sequence
aagagatccccgcccgacac

SEQ ID NO: 1453 - DNA, 20 bp, Artificial
  20-mer unique DNA sequence
cccaccatgccgtcgactta

SEQ ID NO: 1454 - DNA, 20 bp, Artificial
  20-mer unique DNA sequence
ggggcgcaggactcattcat

SEQ ID NO: 1455 - DNA, 20 bp, Artificial
  20-mer unique DNA sequence
ccggtctaatcgccccctgt

SEQ ID NO: 1456 - DNA, 20 bp, Artificial
  20-mer unique DNA sequence
gggccatgagacgcggagag

SEQ ID NO: 1457 - DNA, 20 bp, Artificial
  20-mer unique DNA sequence
ggggggctttagaggaggcg

SEQ ID NO: 1458 - DNA, 20 bp, Artificial
  20-mer unique DNA sequence
tggggttctagacggcatgc

SEQ ID NO: 1459 - DNA, 20 bp, Artificial
  20-mer unique DNA sequence
cgacgccggacctgaatttg

SEQ ID NO: 1460 - DNA, 20 bp, Artificial
  20-mer unique DNA sequence
ttgggcggagacgaatgaca

SEQ ID NO: 1461 - DNA, 20 bp, Artificial
  20-mer unique DNA sequence
aaagacgccccaccaccaac

SEQ ID NO: 1462 - DNA, 20 bp, Artificial
  20-mer unique DNA sequence
accgggaggtgatgggaaaa

SEQ ID NO: 1463 - DNA, 20 bp, Artificial
  20-mer unique DNA sequence
gcgtaagcggggaaggtgag

SEQ ID NO: 1464 - DNA, 20 bp, Artificial
  20-mer unique DNA sequence
cgacccgcttctcgtgttcc

SEQ ID NO: 1465 - DNA, 20 bp, Artificial
  20-mer unique DNA sequence
aaaccgccaacgaactccca

SEQ ID NO: 1466 - DNA, 20 bp, Artificial
  20-mer unique DNA sequence
aggtgctgtgcggggactgt

SEQ ID NO: 1467 - DNA, 20 bp, Artificial
  20-mer unique DNA sequence
agccaacggaacgcacaggt

SEQ ID NO: 1468 - DNA, 20 bp, Artificial
  20-mer unique DNA sequence
tggggcaacttacgggtggc

SEQ ID NO: 1469 - DNA, 20 bp, Artificial
  20-mer unique DNA sequence
cagacgaaccgaggacagcg

SEQ ID NO: 1470 - DNA, 20 bp, Artificial
  20-mer unique DNA sequence
cccaggaaacagacccgccc

SEQ ID NO: 1471 - DNA, 20 bp, Artificial
  20-mer unique DNA sequence
gtctcaatccctcgggccaa

SEQ ID NO: 1472 - DNA, 20 bp, Artificial
  20-mer unique DNA sequence
cccgccctgataaaccgctc

SEQ ID NO: 1473 - DNA, 20 bp, Artificial
  20-mer unique DNA sequence
gcagtgggtgactttggcga

SEQ ID NO: 1474 - DNA, 20 bp, Artificial
  20-mer unique DNA sequence
cacgcgcggatacctcgaaa

SEQ ID NO: 1475 - DNA, 20 bp, Artificial
  20-mer unique DNA sequence
cacccccttccaggacgcta

SEQ ID NO: 1476 - DNA, 20 bp, Artificial
  20-mer unique DNA sequence
cgtgaaaaaagcgcgaaggc

SEQ ID NO: 1477 - DNA, 20 bp, Artificial
  20-mer unique DNA sequence
ggattagtgtcgggaggcgc

SEQ ID NO: 1478 - DNA, 20 bp, Artificial
  20-mer unique DNA sequence
ctcaccccccaggaaaaggc

SEQ ID NO: 1479 - DNA, 20 bp, Artificial
  20-mer unique DNA sequence
ttcagtcccctaccgccctg

SEQ ID NO: 1480 - DNA, 20 bp, Artificial
  20-mer unique DNA sequence
tcggggtcgctgctttaggt

SEQ ID NO: 1481 - DNA, 20 bp, Artificial
  20-mer unique DNA sequence
tgaatttcgcgtgggctgtc

SEQ ID NO: 1482 - DNA, 20 bp, Artificial
  20-mer unique DNA sequence
cacccttcatgcccccagtc

SEQ ID NO: 1483 - DNA, 20 bp, Artificial
  20-mer unique DNA sequence
ccggttcccagccttctcgc

SEQ ID NO: 1484 - DNA, 20 bp, Artificial
  20-mer unique DNA sequence
tcaacgccacccgccaactc

SEQ ID NO: 1485 - DNA, 20 bp, Artificial
  20-mer unique DNA sequence
tgccaacctcttcccctccg

SEQ ID NO: 1486 - DNA, 20 bp, Artificial
  20-mer unique DNA sequence
gcaatgatacgccgccccca

SEQ ID NO: 1487 - DNA, 20 bp, Artificial
  20-mer unique DNA sequence
tcgccaatcccccagctttt

SEQ ID NO: 1488 - DNA, 20 bp, Artificial
  20-mer unique DNA sequence
acgctccccgacacaacctc

SEQ ID NO: 1489 - DNA, 20 bp, Artificial
  20-mer unique DNA sequence
tgattgcgttcggcggtttg

SEQ ID NO: 1490 - DNA, 20 bp, Artificial
  20-mer unique DNA sequence
ggaggcaaagccgagaatgg

SEQ ID NO: 1491 - DNA, 20 bp, Artificial
  20-mer unique DNA sequence
tttacggggcgttttcgctg

SEQ ID NO: 1492 - DNA, 20 bp, Artificial
  20-mer unique DNA sequence
atccgcgctatgcacccttg

SEQ ID NO: 1493 - DNA, 20 bp, Artificial
  20-mer unique DNA sequence
cgcggatgggagtgttctga

SEQ ID NO: 1494 - DNA, 20 bp, Artificial
  20-mer unique DNA sequence
ccgcgacatgacgcacttag

SEQ ID NO: 1495 - DNA, 20 bp, Artificial
  20-mer unique DNA sequence
aactgtcctcacaggcccac

SEQ ID NO: 1496 - DNA, 20 bp, Artificial
  20-mer unique DNA sequence
tgggttaacggggagcgcaa

SEQ ID NO: 1497 - DNA, 20 bp, Artificial
  20-mer unique DNA sequence
ccagaaatccgcgccacagg

SEQ ID NO: 1498 - DNA, 20 bp, Artificial
  20-mer unique DNA sequence
cttatcgccgctttggctgc

SEQ ID NO: 1499 - DNA, 20 bp, Artificial
  20-mer unique DNA sequence
agcttgccggacccattcgg

SEQ ID NO: 1500 - DNA, 20 bp, Artificial
  20-mer unique DNA sequence
gcaggtcgcggggaaacaac

SEQ ID NO: 1501 - DNA, 20 bp, Artificial
  20-mer unique DNA sequence
gttgcgcgacgggagttcat

SEQ ID NO: 1502 - DNA, 20 bp, Artificial
  20-mer unique DNA sequence
tgcgttgctggaatggagtg

SEQ ID NO: 1503 - DNA, 20 bp, Artificial
  20-mer unique DNA sequence
acctccccaggtgcgacctc

SEQ ID NO: 1504 - DNA, 20 bp, Artificial
  20-mer unique DNA sequence
ttgcccgccttcccaagtct

SEQ ID NO: 1505 - DNA, 20 bp, Artificial
  20-mer unique DNA sequence
ggtaaggcgaatgggcaaca

SEQ ID NO: 1506 - DNA, 20 bp, Artificial
  20-mer unique DNA sequence
atccgcgtctttcccccttc

SEQ ID NO: 1507 - DNA, 20 bp, Artificial
  20-mer unique DNA sequence
ccgcgggccacttgttcttt

SEQ ID NO: 1508 - DNA, 20 bp, Artificial
  20-mer unique DNA sequence
accaccctgggaccctgtta

SEQ ID NO: 1509 - DNA, 20 bp, Artificial
  20-mer unique DNA sequence
ggtacggcagccgctttaga

SEQ ID NO: 1510 - DNA, 20 bp, Artificial
  20-mer unique DNA sequence
gggttcgacagggagggggt

SEQ ID NO: 1511 - DNA, 20 bp, Artificial
  20-mer unique DNA sequence
agcccgacgcgatttgtatt

SEQ ID NO: 1512 - DNA, 20 bp, Artificial
  20-mer unique DNA sequence
tcgacgcgggagagggaaca

SEQ ID NO: 1513 - DNA, 20 bp, Artificial
  20-mer unique DNA sequence
gctcttgcgtcccccgttag

SEQ ID NO: 1514 - DNA, 20 bp, Artificial
  20-mer unique DNA sequence
gctgccccgatgattccaac

SEQ ID NO: 1515 - DNA, 20 bp, Artificial
  20-mer unique DNA sequence
ggggccggcgtagtttttgg

SEQ ID NO: 1516 - DNA, 20 bp, Artificial
  20-mer unique DNA sequence
agtgggacgggcttgcatca

SEQ ID NO: 1517 - DNA, 20 bp, Artificial
  20-mer unique DNA sequence
ctaacgtatccctcggcgcc

SEQ ID NO: 1518 - DNA, 20 bp, Artificial
  20-mer unique DNA sequence
tcacccaccgtcgcctgtct

SEQ ID NO: 1519 - DNA, 20 bp, Artificial
  20-mer unique DNA sequence
tcatcacgcaccccgagttc

SEQ ID NO: 1520 - DNA, 20 bp, Artificial
  20-mer unique DNA sequence
gcggaccctcgatagcagca

SEQ ID NO: 1521 - DNA, 20 bp, Artificial
  20-mer unique DNA sequence
ttcgcagggtccattctccc

SEQ ID NO: 1522 - DNA, 20 bp, Artificial
  20-mer unique DNA sequence
aaacgcccttcgcccacctg

SEQ ID NO: 1523 - DNA, 20 bp, Artificial
  20-mer unique DNA sequence
ctcgtgcagattttgggggg

SEQ ID NO: 1524 - DNA, 20 bp, Artificial
  20-mer unique DNA sequence
gggcccgtgatcgcttatgg

SEQ ID NO: 1525 - DNA, 20 bp, Artificial
  20-mer unique DNA sequence
cgtgtttaggccccgtgcga

SEQ ID NO: 1526 - DNA, 20 bp, Artificial
  20-mer unique DNA sequence
gcagcgctacactcccgacc

SEQ ID NO: 1527 - DNA, 20 bp, Artificial
  20-mer unique DNA sequence
gcgacggccatcaacacaat

SEQ ID NO: 1528 - DNA, 20 bp, Artificial
  20-mer unique DNA sequence
ttgcgcgctttgaattttgg

SEQ ID NO: 1529 - DNA, 20 bp, Artificial
  20-mer unique DNA sequence
ttacgggcggcagggagcta

SEQ ID NO: 1530 - DNA, 20 bp, Artificial
  20-mer unique DNA sequence
gtcgctcgtggggttgtgct

SEQ ID NO: 1531 - DNA, 20 bp, Artificial
  20-mer unique DNA sequence
caggatgcaacgaaacggaa

SEQ ID NO: 1532 - DNA, 20 bp, Artificial
  20-mer unique DNA sequence
ataatgagggccgcgcgtga

SEQ ID NO: 1533 - DNA, 20 bp, Artificial
  20-mer unique DNA sequence
ggaagtggtgtgcgtggggg

SEQ ID NO: 1534 - DNA, 20 bp, Artificial
  20-mer unique DNA sequence
tcaggacttgcgcggggata

SEQ ID NO: 1535 - DNA, 20 bp, Artificial
  20-mer unique DNA sequence
gacccatcaaacacgccccg

SEQ ID NO: 1536 - DNA, 20 bp, Artificial
  20-mer unique DNA sequence
gcccattctcacccgtcctg

SEQ ID NO: 1537 - DNA, 20 bp, Artificial
  20-mer unique DNA sequence
actagggtcaaatcgggggc

SEQ ID NO: 1538 - DNA, 20 bp, Artificial
  20-mer unique DNA sequence
acggggggggaaaacgattg

SEQ ID NO: 1539 - DNA, 20 bp, Artificial
  20-mer unique DNA sequence
gttttggcgggctgtggtgc

SEQ ID NO: 1540 - DNA, 20 bp, Artificial
  20-mer unique DNA sequence
aaatggcccgcaaggacgaa

SEQ ID NO: 1541 - DNA, 20 bp, Artificial
  20-mer unique DNA sequence
aaacctgacccgaagcccgc

SEQ ID NO: 1542 - DNA, 20 bp, Artificial
  20-mer unique DNA sequence
tgggccaccgatcttaagcg

SEQ ID NO: 1543 - DNA, 20 bp, Artificial
  20-mer unique DNA sequence
gtgttgggcgggaggtgtcc

SEQ ID NO: 1544 - DNA, 20 bp, Artificial
  20-mer unique DNA sequence
aaactggtagtggcgggcgg

SEQ ID NO: 1545 - DNA, 20 bp, Artificial
  20-mer unique DNA sequence
caggtcccccgtcgtcatct

SEQ ID NO: 1546 - DNA, 20 bp, Artificial
  20-mer unique DNA sequence
aaggctgcgtgggaattcgg

SEQ ID NO: 1547 - DNA, 20 bp, Artificial
  20-mer unique DNA sequence
gcggatgaggggatggttgg

SEQ ID NO: 1548 - DNA, 20 bp, Artificial
  20-mer unique DNA sequence
ggggcagattcgggtttggg

SEQ ID NO: 1549 - DNA, 20 bp, Artificial
  20-mer unique DNA sequence
tgtgggtggccgtgtaggag

SEQ ID NO: 1550 - DNA, 20 bp, Artificial
  20-mer unique DNA sequence
gagactctaaccgctcggca

SEQ ID NO: 1551 - DNA, 20 bp, Artificial
  20-mer unique DNA sequence
ttcgggagacggagtgcagc

SEQ ID NO: 1552 - DNA, 20 bp, Artificial
  20-mer unique DNA sequence
tcgtgtgtccgcgcgttact

SEQ ID NO: 1553 - DNA, 20 bp, Artificial
  20-mer unique DNA sequence
cgcaatatacaacggccccc

SEQ ID NO: 1554 - DNA, 20 bp, Artificial
  20-mer unique DNA sequence
cgctacgaccgcctccaacc

SEQ ID NO: 1555 - DNA, 20 bp, Artificial
  20-mer unique DNA sequence
tgcctcgcgttggttttccg

SEQ ID NO: 1556 - DNA, 20 bp, Artificial
  20-mer unique DNA sequence
ggatggattgggcgttgagg

SEQ ID NO: 1557 - DNA, 20 bp, Artificial
  20-mer unique DNA sequence
acgagacacgggcccagcag

SEQ ID NO: 1558 - DNA, 20 bp, Artificial
  20-mer unique DNA sequence
tgatccgtgcgtgggtgaag

SEQ ID NO: 1559 - DNA, 20 bp, Artificial
  20-mer unique DNA sequence
tgctgattggccccgtaccc

SEQ ID NO: 1560 - DNA, 20 bp, Artificial
  20-mer unique DNA sequence
ctcatcccgccgcaacgtta

SEQ ID NO: 1561 - DNA, 20 bp, Artificial
  20-mer unique DNA sequence
gcatgcggcgttttcctttg

SEQ ID NO: 1562 - DNA, 20 bp, Artificial
  20-mer unique DNA sequence
tttgggggtttggggacgtt

SEQ ID NO: 1563 - DNA, 20 bp, Artificial
  20-mer unique DNA sequence
cggagttgctttcggatcgg

SEQ ID NO: 1564 - DNA, 20 bp, Artificial
  20-mer unique DNA sequence
gcacagacgcggacatgacg

SEQ ID NO: 1565 - DNA, 20 bp, Artificial
  20-mer unique DNA sequence
cccccgcccctaaaagaacc

SEQ ID NO: 1566 - DNA, 20 bp, Artificial
  20-mer unique DNA sequence
gtggagaaatcacggggggc

SEQ ID NO: 1567 - DNA, 20 bp, Artificial
  20-mer unique DNA sequence
aggggacggaaggagacggg

SEQ ID NO: 1568 - DNA, 20 bp, Artificial
  20-mer unique DNA sequence
acgccgcacaaacacagggc

SEQ ID NO: 1569 - DNA, 20 bp, Artificial
  20-mer unique DNA sequence
tcccgccatcactcttccag

SEQ ID NO: 1570 - DNA, 20 bp, Artificial
  20-mer unique DNA sequence
cgctgccaagcgaaacggtc

SEQ ID NO: 1571 - DNA, 20 bp, Artificial
  20-mer unique DNA sequence
acctttaagttcgcgcgccg

SEQ ID NO: 1572 - DNA, 20 bp, Artificial
  20-mer unique DNA sequence
tactgcccgatccctgctgc

SEQ ID NO: 1573 - DNA, 20 bp, Artificial
  20-mer unique DNA sequence
attaggtattcccgggcgcc

SEQ ID NO: 1574 - DNA, 20 bp, Artificial
  20-mer unique DNA sequence
aacctctatccccagcgccc

SEQ ID NO: 1575 - DNA, 20 bp, Artificial
  20-mer unique DNA sequence
acccataagccgccacagaa

SEQ ID NO: 1576 - DNA, 20 bp, Artificial
  20-mer unique DNA sequence
atgggacggggtgattctcg

SEQ ID NO: 1577 - DNA, 20 bp, Artificial
  20-mer unique DNA sequence
gccgagggttggggagtgtg

SEQ ID NO: 1578 - DNA, 20 bp, Artificial
  20-mer unique DNA sequence
gcccacgacgaccaagatcc

SEQ ID NO: 1579 - DNA, 20 bp, Artificial
  20-mer unique DNA sequence
ccaaaccgacaaaacgcgaa

SEQ ID NO: 1580 - DNA, 20 bp, Artificial
  20-mer unique DNA sequence
ctttcgggggctaacgggct

SEQ ID NO: 1581 - DNA, 20 bp, Artificial
  20-mer unique DNA sequence
acactattgcttccgcccgc

SEQ ID NO: 1582 - DNA, 20 bp, Artificial
  20-mer unique DNA sequence
gtcctcgtttaaccccccgg

SEQ ID NO: 1583 - DNA, 20 bp, Artificial
  20-mer unique DNA sequence
acgctgtcccctaccgcctc

SEQ ID NO: 1584 - DNA, 20 bp, Artificial
  20-mer unique DNA sequence
atgagttcccgcgacgccct

SEQ ID NO: 1585 - DNA, 20 bp, Artificial
  20-mer unique DNA sequence
cgccgaagtgctccaaggat

SEQ ID NO: 1586 - DNA, 20 bp, Artificial
  20-mer unique DNA sequence
agcaggcgggaggttacgag

SEQ ID NO: 1587 - DNA, 20 bp, Artificial
  20-mer unique DNA sequence
cccagaaaggcgcatcgaac

SEQ ID NO: 1588 - DNA, 20 bp, Artificial
  20-mer unique DNA sequence
aacccggacgagcgaattgt

SEQ ID NO: 1589 - DNA, 20 bp, Artificial
  20-mer unique DNA sequence
gccagcacccccatttcatt

SEQ ID NO: 1590 - DNA, 20 bp, Artificial
  20-mer unique DNA sequence
cgacctctaatgctcccggg

SEQ ID NO: 1591 - DNA, 20 bp, Artificial
  20-mer unique DNA sequence
acggctcacaaacggctgcg

SEQ ID NO: 1592 - DNA, 20 bp, Artificial
  20-mer unique DNA sequence
tgtcttcaaccccaccccga

SEQ ID NO: 1593 - DNA, 20 bp, Artificial
  20-mer unique DNA sequence
gtgggcggttttttttgcgt

SEQ ID NO: 1594 - DNA, 20 bp, Artificial
  20-mer unique DNA sequence
cgcggggaagtagggagcac

SEQ ID NO: 1595 - DNA, 20 bp, Artificial
  20-mer unique DNA sequence
agtgggcgaaaggtttggaa

SEQ ID NO: 1596 - DNA, 20 bp, Artificial
  20-mer unique DNA sequence
cctgggctgatcgttcggtt

SEQ ID NO: 1597 - DNA, 20 bp, Artificial
  20-mer unique DNA sequence
ctgtgctcgcctttcgctcc

SEQ ID NO: 1598 - DNA, 20 bp, Artificial
  20-mer unique DNA sequence
tctcctcgcccgctttgttg

SEQ ID NO: 1599 - DNA, 20 bp, Artificial
  20-mer unique DNA sequence
cggccaccttcccattagcg

SEQ ID NO: 1600 - DNA, 20 bp, Artificial
  20-mer unique DNA sequence
gagaaaaggcccgcgtcgac

SEQ ID NO: 1601 - DNA, 20 bp, Artificial
  20-mer unique DNA sequence
tgagcgagagcgtgaggagc

SEQ ID NO: 1602 - DNA, 20 bp, Artificial
  20-mer unique DNA sequence
ttggacggaaaagctggggt

SEQ ID NO: 1603 - DNA, 20 bp, Artificial
  20-mer unique DNA sequence
cgaattcagtagcaccgcgg

SEQ ID NO: 1604 - DNA, 20 bp, Artificial
  20-mer unique DNA sequence
tccattgccacgagttcccc

SEQ ID NO: 1605 - DNA, 20 bp, Artificial
  20-mer unique DNA sequence
cccccccactcgctatccag

SEQ ID NO: 1606 - DNA, 20 bp, Artificial
  20-mer unique DNA sequence
ggctccaccctaggtccgct

SEQ ID NO: 1607 - DNA, 20 bp, Artificial
  20-mer unique DNA sequence
cgataaaatcatggcccccg

SEQ ID NO: 1608 - DNA, 20 bp, Artificial
  20-mer unique DNA sequence
caagcgggcccagagaatgt

SEQ ID NO: 1609 - DNA, 20 bp, Artificial
  20-mer unique DNA sequence
cgcgcccggttgttttcttt

SEQ ID NO: 1610 - DNA, 20 bp, Artificial
  20-mer unique DNA sequence
ggcacggcagaacgcaatgt

SEQ ID NO: 1611 - DNA, 20 bp, Artificial
  20-mer unique DNA sequence
tgcaagatccccagcccgtc

SEQ ID NO: 1612 - DNA, 20 bp, Artificial
  20-mer unique DNA sequence
gcgcccaccagcagaactca

SEQ ID NO: 1613 - DNA, 20 bp, Artificial
  20-mer unique DNA sequence
ggggggcgggagttttatgc

SEQ ID NO: 1614 - DNA, 20 bp, Artificial
  20-mer unique DNA sequence
agagaggaggggcgcggaca

SEQ ID NO: 1615 - DNA, 20 bp, Artificial
  20-mer unique DNA sequence
gggtgcggatcaattgggtt

SEQ ID NO: 1616 - DNA, 20 bp, Artificial
  20-mer unique DNA sequence
acgcgcgagccccttatgat

SEQ ID NO: 1617 - DNA, 20 bp, Artificial
  20-mer unique DNA sequence
gcagggatcgtgggaacagc

SEQ ID NO: 1618 - DNA, 20 bp, Artificial
  20-mer unique DNA sequence
gctttggagggaggcggcta

SEQ ID NO: 1619 - DNA, 20 bp, Artificial
  20-mer unique DNA sequence
agcgctggttgttcggatcg

SEQ ID NO: 1620 - DNA, 20 bp, Artificial
  20-mer unique DNA sequence
caggtaggccaagtcggggg

SEQ ID NO: 1621 - DNA, 20 bp, Artificial
  20-mer unique DNA sequence
gtgctcgtatccctcccgcc

SEQ ID NO: 1622 - DNA, 20 bp, Artificial
  20-mer unique DNA sequence
cgaggaagcgggcacaaggt

SEQ ID NO: 1623 - DNA, 20 bp, Artificial
  20-mer unique DNA sequence
cgaggcacgcgaaaaacaaa

SEQ ID NO: 1624 - DNA, 20 bp, Artificial
  20-mer unique DNA sequence
gaagcgatgggcaaaagccc

SEQ ID NO: 1625 - DNA, 20 bp, Artificial
  20-mer unique DNA sequence
cttactcgccgctccttggg

SEQ ID NO: 1626 - DNA, 20 bp, Artificial
  20-mer unique DNA sequence
cgagcgaggaagggtgtaat

SEQ ID NO: 1627 - DNA, 20 bp, Artificial
  20-mer unique DNA sequence
ctactcacacaacgcgcgca

SEQ ID NO: 1628 - DNA, 20 bp, Artificial
  20-mer unique DNA sequence
attcggttggcggtaggggt

SEQ ID NO: 1629 - DNA, 20 bp, Artificial
  20-mer unique DNA sequence
gggcgtagaatgaccgaggg

SEQ ID NO: 1630 - DNA, 20 bp, Artificial
  20-mer unique DNA sequence
gcgagggaaatgaaacggcg

SEQ ID NO: 1631 - DNA, 20 bp, Artificial
  20-mer unique DNA sequence
ccccaagcgatcagaaggcg

SEQ ID NO: 1632 - DNA, 20 bp, Artificial
  20-mer unique DNA sequence
cggaggttggcaggcgtgat

SEQ ID NO: 1633 - DNA, 20 bp, Artificial
  20-mer unique DNA sequence
ggagcacacatacgcggggg

SEQ ID NO: 1634 - DNA, 20 bp, Artificial
  20-mer unique DNA sequence
tcatcgacggggggattctg

SEQ ID NO: 1635 - DNA, 20 bp, Artificial
  20-mer unique DNA sequence
gacgtcagaccccccatgga

SEQ ID NO: 1636 - DNA, 20 bp, Artificial
  20-mer unique DNA sequence
gcttggatggccttgggtcg

SEQ ID NO: 1637 - DNA, 20 bp, Artificial
  20-mer unique DNA sequence
tgtcgatcagggggcgtggc

SEQ ID NO: 1638 - DNA, 20 bp, Artificial
  20-mer unique DNA sequence
agactgatgccccccaccgg

SEQ ID NO: 1639 - DNA, 20 bp, Artificial
  20-mer unique DNA sequence
ttcgcgtcaagggtggttcc

SEQ ID NO: 1640 - DNA, 20 bp, Artificial
  20-mer unique DNA sequence
cccaagtaacgcccgccaga

SEQ ID NO: 1641 - DNA, 20 bp, Artificial
  20-mer unique DNA sequence
gcgccctctcttcaccttgg

SEQ ID NO: 1642 - DNA, 20 bp, Artificial
  20-mer unique DNA sequence
tccgggcgccaatatgttcg

SEQ ID NO: 1643 - DNA, 20 bp, Artificial
  20-mer unique DNA sequence
aaccaccccctattcggcca

SEQ ID NO: 1644 - DNA, 20 bp, Artificial
  20-mer unique DNA sequence
atgtcggaaatgtgcgtggc

SEQ ID NO: 1645 - DNA, 20 bp, Artificial
  20-mer unique DNA sequence
ccgatctgcacagcccccaa

SEQ ID NO: 1646 - DNA, 20 bp, Artificial
  20-mer unique DNA sequence
cctcctttttctgccccgcc

SEQ ID NO: 1647 - DNA, 20 bp, Artificial
  20-mer unique DNA sequence
ggcggtagggatgaggggaa

SEQ ID NO: 1648 - DNA, 20 bp, Artificial
  20-mer unique DNA sequence
cgcctcccgtatgaactcct

SEQ ID NO: 1649 - DNA, 20 bp, Artificial
  20-mer unique DNA sequence
tcgcgctgctcccccactta

SEQ ID NO: 1650 - DNA, 20 bp, Artificial
  20-mer unique DNA sequence
atctcccccgtctcgcgcat

SEQ ID NO: 1651 - DNA, 20 bp, Artificial
  20-mer unique DNA sequence
gcggggggacttatcgatgg

SEQ ID NO: 1652 - DNA, 20 bp, Artificial
  20-mer unique DNA sequence
ggggttgctcttggctgtcg

SEQ ID NO: 1653 - DNA, 20 bp, Artificial
  20-mer unique DNA sequence
tcaagaaggcatgcgaccgg

SEQ ID NO: 1654 - DNA, 20 bp, Artificial
  20-mer unique DNA sequence
tgccgtggggtgggtgaatt

SEQ ID NO: 1655 - DNA, 20 bp, Artificial
  20-mer unique DNA sequence
aaactgggagcgctgcaacg

SEQ ID NO: 1656 - DNA, 20 bp, Artificial
  20-mer unique DNA sequence
ctaacccccccctgccggct

SEQ ID NO: 1657 - DNA, 20 bp, Artificial
  20-mer unique DNA sequence
cagtgccgaacaaagcgagg

SEQ ID NO: 1658 - DNA, 20 bp, Artificial
  20-mer unique DNA sequence
cgggcccagttccttttgac

SEQ ID NO: 1659 - DNA, 20 bp, Artificial
  20-mer unique DNA sequence
attgggtcggcaggaacgtc

SEQ ID NO: 1660 - DNA, 20 bp, Artificial
  20-mer unique DNA sequence
gccccacatgccggtgtaag

SEQ ID NO: 1661 - DNA, 20 bp, Artificial
  20-mer unique DNA sequence
acctgtgtgcctatcggcgg

SEQ ID NO: 1662 - DNA, 20 bp, Artificial
  20-mer unique DNA sequence
acgttggcgtcagtcgatga

SEQ ID NO: 1663 - DNA, 20 bp, Artificial
  20-mer unique DNA sequence
agacagtcggcgcgatagga

SEQ ID NO: 1664 - DNA, 20 bp, Artificial
  20-mer unique DNA sequence
agctcttaattgccggcccc

SEQ ID NO: 1665 - DNA, 20 bp, Artificial
  20-mer unique DNA sequence
ttaccctgacctgcgcccga

SEQ ID NO: 1666 - DNA, 20 bp, Artificial
  20-mer unique DNA sequence
atgcaagcgtgtcgtaagga

SEQ ID NO: 1667 - DNA, 20 bp, Artificial
  20-mer unique DNA sequence
ggcttatggcgggtgcgagt

SEQ ID NO: 1668 - DNA, 20 bp, Artificial
  20-mer unique DNA sequence
acccgtatccccgcctgctg

SEQ ID NO: 1669 - DNA, 20 bp, Artificial
  20-mer unique DNA sequence
catttcgagtgggggtccgc

SEQ ID NO: 1670 - DNA, 20 bp, Artificial
  20-mer unique DNA sequence
ctcgtgggaagcgtcaagcc

SEQ ID NO: 1671 - DNA, 20 bp, Artificial
  20-mer unique DNA sequence
aggaaggatgcagccagcga

SEQ ID NO: 1672 - DNA, 20 bp, Artificial
  20-mer unique DNA sequence
gggcgggctcgtgcaagatt

SEQ ID NO: 1673 - DNA, 20 bp, Artificial
  20-mer unique DNA sequence
ctcaccccctgcatacacaa

SEQ ID NO: 1674 - DNA, 20 bp, Artificial
  20-mer unique DNA sequence
ctggtgctgggctcatgggc

SEQ ID NO: 1675 - DNA, 20 bp, Artificial
  20-mer unique DNA sequence
aattgtcacggcgcccaagc

SEQ ID NO: 1676 - DNA, 20 bp, Artificial
  20-mer unique DNA sequence
ccgggcccattcatcctgta

SEQ ID NO: 1677 - DNA, 20 bp, Artificial
  20-mer unique DNA sequence
gactgggacgaggcgcttgg

SEQ ID NO: 1678 - DNA, 20 bp, Artificial
  20-mer unique DNA sequence
cgaagcagcaagacaacgcc

SEQ ID NO: 1679 - DNA, 20 bp, Artificial
  20-mer unique DNA sequence
agcccccggtagtcccaaga

SEQ ID NO: 1680 - DNA, 20 bp, Artificial
  20-mer unique DNA sequence
ccccacacatatccacgccc

SEQ ID NO: 1681 - DNA, 20 bp, Artificial
  20-mer unique DNA sequence
actgcattaccttccccgcg

SEQ ID NO: 1682 - DNA, 20 bp, Artificial
  20-mer unique DNA sequence
tctgggtctacgtgaacggc

SEQ ID NO: 1683 - DNA, 20 bp, Artificial
  20-mer unique DNA sequence
atgagcgcacgcgactcaat

SEQ ID NO: 1684 - DNA, 20 bp, Artificial
  20-mer unique DNA sequence
cggccgcaggacaaagtggg

SEQ ID NO: 1685 - DNA, 20 bp, Artificial
  20-mer unique DNA sequence
gacacctcccacccaccgca

SEQ ID NO: 1686 - DNA, 20 bp, Artificial
  20-mer unique DNA sequence
aacggcggggaccataacaa

SEQ ID NO: 1687 - DNA, 20 bp, Artificial
  20-mer unique DNA sequence
ccgtcattctcctttggccc

SEQ ID NO: 1688 - DNA, 20 bp, Artificial
  20-mer unique DNA sequence
acccgccacgcaagtcaatg

SEQ ID NO: 1689 - DNA, 20 bp, Artificial
  20-mer unique DNA sequence
cgaagaccacgggggaaaag

SEQ ID NO: 1690 - DNA, 20 bp, Artificial
  20-mer unique DNA sequence
tgagaccgcccatgcctgta

SEQ ID NO: 1691 - DNA, 20 bp, Artificial
  20-mer unique DNA sequence
gccgacccctaccctcccat

SEQ ID NO: 1692 - DNA, 20 bp, Artificial
  20-mer unique DNA sequence
ttgcggatttgcggtgagac

SEQ ID NO: 1693 - DNA, 20 bp, Artificial
  20-mer unique DNA sequence
cgtcgtgataggggtgggct

SEQ ID NO: 1694 - DNA, 20 bp, Artificial
  20-mer unique DNA sequence
tgcacgcccacaacccatac

SEQ ID NO: 1695 - DNA, 20 bp, Artificial
  20-mer unique DNA sequence
gaggagcattggcggaacgt

SEQ ID NO: 1696 - DNA, 20 bp, Artificial
  20-mer unique DNA sequence
tgacgactttgaccgccctg

SEQ ID NO: 1697 - DNA, 20 bp, Artificial
  20-mer unique DNA sequence
ggatgcttgcgggtggttca

SEQ ID NO: 1698 - DNA, 20 bp, Artificial
  20-mer unique DNA sequence
aggcggagattttggagggc

SEQ ID NO: 1699 - DNA, 20 bp, Artificial
  20-mer unique DNA sequence
actcctcggagggggtgttt

SEQ ID NO: 1700 - DNA, 20 bp, Artificial
  20-mer unique DNA sequence
aatcgcacacggagcaatgc

SEQ ID NO: 1701 - DNA, 20 bp, Artificial
  20-mer unique DNA sequence
cattggttcctttccgcggg

SEQ ID NO: 1702 - DNA, 20 bp, Artificial
  20-mer unique DNA sequence
agccaaaggaggcaaggggc

SEQ ID NO: 1703 - DNA, 20 bp, Artificial
  20-mer unique DNA sequence
caagccgacccaccaggcag

SEQ ID NO: 1704 - DNA, 20 bp, Artificial
  20-mer unique DNA sequence
ttaggtggtgtgctgcggga

SEQ ID NO: 1705 - DNA, 20 bp, Artificial
  20-mer unique DNA sequence
ggatgacccgcaacagacgc

SEQ ID NO: 1706 - DNA, 20 bp, Artificial
  20-mer unique DNA sequence
acccgcgcaggctataggaa

SEQ ID NO: 1707 - DNA, 20 bp, Artificial
  20-mer unique DNA sequence
ttatcccacagccaccgcct

SEQ ID NO: 1708 - DNA, 20 bp, Artificial
  20-mer unique DNA sequence
aagctagtcgctaagcgggc

SEQ ID NO: 1709 - DNA, 20 bp, Artificial
  20-mer unique DNA sequence
ggagcgtaccgagcctgttt

SEQ ID NO: 1710 - DNA, 20 bp, Artificial
  20-mer unique DNA sequence
gtgacgggagagcggaagcg

SEQ ID NO: 1711 - DNA, 20 bp, Artificial
  20-mer unique DNA sequence
gggctgagttgtccggcgtt

SEQ ID NO: 1712 - DNA, 20 bp, Artificial
  20-mer unique DNA sequence
gcacttttcgtcctcggcca

SEQ ID NO: 1713 - DNA, 20 bp, Artificial
  20-mer unique DNA sequence
gtgagcgcgggagggagtct

SEQ ID NO: 1714 - DNA, 20 bp, Artificial
  20-mer unique DNA sequence
tggggaaagcgggatggact

SEQ ID NO: 1715 - DNA, 20 bp, Artificial
  20-mer unique DNA sequence
attcccgccctagcctccgt

SEQ ID NO: 1716 - DNA, 20 bp, Artificial
  20-mer unique DNA sequence
cggcggcaatggtggtactc

SEQ ID NO: 1717 - DNA, 20 bp, Artificial
  20-mer unique DNA sequence
acagacgccgcaatcaccag

SEQ ID NO: 1718 - DNA, 20 bp, Artificial
  20-mer unique DNA sequence
agtgatgggaactgggcggt

SEQ ID NO: 1719 - DNA, 20 bp, Artificial
  20-mer unique DNA sequence
cagggggggcgatgtgtgct

SEQ ID NO: 1720 - DNA, 20 bp, Artificial
  20-mer unique DNA sequence
ggcgcgcgtagtggagatct

SEQ ID NO: 1721 - DNA, 20 bp, Artificial
  20-mer unique DNA sequence
gctccgaagaattgcccccc

SEQ ID NO: 1722 - DNA, 20 bp, Artificial
  20-mer unique DNA sequence
tggcaatcccccgaaagcat

SEQ ID NO: 1723 - DNA, 20 bp, Artificial
  20-mer unique DNA sequence
aaacaccccgctaccacgca

SEQ ID NO: 1724 - DNA, 20 bp, Artificial
  20-mer unique DNA sequence
gccgggacgagacctatgcg

SEQ ID NO: 1725 - DNA, 20 bp, Artificial
  20-mer unique DNA sequence
ctcgccagcttaacgccctc

SEQ ID NO: 1726 - DNA, 20 bp, Artificial
  20-mer unique DNA sequence
gccgaccaatgcaccgctaa

SEQ ID NO: 1727 - DNA, 20 bp, Artificial
  20-mer unique DNA sequence
ctggtgtggggtggagagca

SEQ ID NO: 1728 - DNA, 20 bp, Artificial
  20-mer unique DNA sequence
cctattggtccccgccctga

SEQ ID NO: 1729 - DNA, 20 bp, Artificial
  20-mer unique DNA sequence
cttggcggggggctataacg

SEQ ID NO: 1730 - DNA, 20 bp, Artificial
  20-mer unique DNA sequence
tcccccttgaacccatccaa

SEQ ID NO: 1731 - DNA, 20 bp, Artificial
  20-mer unique DNA sequence
ccctcaccgccgatttttcc

SEQ ID NO: 1732 - DNA, 20 bp, Artificial
  20-mer unique DNA sequence
gagtgcggagatggcgaggt

SEQ ID NO: 1733 - DNA, 20 bp, Artificial
  20-mer unique DNA sequence
gtgtcccgccaccccctcgg

SEQ ID NO: 1734 - DNA, 20 bp, Artificial
  20-mer unique DNA sequence
gccaaatcggtgaagtgcca

SEQ ID NO: 1735 - DNA, 20 bp, Artificial
  20-mer unique DNA sequence
cgaaccccacaccgatagca

SEQ ID NO: 1736 - DNA, 20 bp, Artificial
  20-mer unique DNA sequence
gccccccgatccagcttact

SEQ ID NO: 1737 - DNA, 20 bp, Artificial
  20-mer unique DNA sequence
gcgatggagggacgttgtcg

SEQ ID NO: 1738 - DNA, 20 bp, Artificial
  20-mer unique DNA sequence
cgccctcagacgccaattcc

SEQ ID NO: 1739 - DNA, 20 bp, Artificial
  20-mer unique DNA sequence
cgcccatgcagatccaagcc

SEQ ID NO: 1740 - DNA, 20 bp, Artificial
  20-mer unique DNA sequence
tagcccgccaacgcactgac

SEQ ID NO: 1741 - DNA, 20 bp, Artificial
  20-mer unique DNA sequence
cgggagcggagccaatcaga

SEQ ID NO: 1742 - DNA, 20 bp, Artificial
  20-mer unique DNA sequence
ctggcgcccgtaaagagtgg

SEQ ID NO: 1743 - DNA, 20 bp, Artificial
  20-mer unique DNA sequence
atgtcgctctcccgtgaccg

SEQ ID NO: 1744 - DNA, 20 bp, Artificial
  20-mer unique DNA sequence
aactggcctgctatgcggcg

SEQ ID NO: 1745 - DNA, 20 bp, Artificial
  20-mer unique DNA sequence
tcgggctgaggtttgcggag

SEQ ID NO: 1746 - DNA, 20 bp, Artificial
  20-mer unique DNA sequence
tcacaggagggcgcaagcat

SEQ ID NO: 1747 - DNA, 20 bp, Artificial
  20-mer unique DNA sequence
ctcgccgctaatttcccccg

SEQ ID NO: 1748 - DNA, 20 bp, Artificial
  20-mer unique DNA sequence
gaagaatgtcgccggcctgg

SEQ ID NO: 1749 - DNA, 20 bp, Artificial
  20-mer unique DNA sequence
taccgcacccccaaacaggc

SEQ ID NO: 1750 - DNA, 20 bp, Artificial
  20-mer unique DNA sequence
atgtggagggtggcagagcc

SEQ ID NO: 1751 - DNA, 20 bp, Artificial
  20-mer unique DNA sequence
tgcctagcatccccacacgg

SEQ ID NO: 1752 - DNA, 20 bp, Artificial
  20-mer unique DNA sequence
agcgggtggtgaggaaggca

SEQ ID NO: 1753 - DNA, 20 bp, Artificial
  20-mer unique DNA sequence
ggggatcaggcctcaaacga

SEQ ID NO: 1754 - DNA, 20 bp, Artificial
  20-mer unique DNA sequence
cctccccaactacggtccca

SEQ ID NO: 1755 - DNA, 20 bp, Artificial
  20-mer unique DNA sequence
cagttagcggatgagggcgg

SEQ ID NO: 1756 - DNA, 20 bp, Artificial
  20-mer unique DNA sequence
agcgatgaagaacggtggcg

SEQ ID NO: 1757 - DNA, 20 bp, Artificial
  20-mer unique DNA sequence
tccactcgcacctcaccccc

SEQ ID NO: 1758 - DNA, 20 bp, Artificial
  20-mer unique DNA sequence
ctcatgccgtccgaaaggga

SEQ ID NO: 1759 - DNA, 20 bp, Artificial
  20-mer unique DNA sequence
tatggggcagggggggaatt

SEQ ID NO: 1760 - DNA, 20 bp, Artificial
  20-mer unique DNA sequence
tcccacctgctgacccgctt

SEQ ID NO: 1761 - DNA, 20 bp, Artificial
  20-mer unique DNA sequence
ttatcccccgcgctatgtgc

SEQ ID NO: 1762 - DNA, 20 bp, Artificial
  20-mer unique DNA sequence
ggcgggtgggggttcgtaag

SEQ ID NO: 1763 - DNA, 20 bp, Artificial
  20-mer unique DNA sequence
aggtgcaaggccaagcgatg

SEQ ID NO: 1764 - DNA, 20 bp, Artificial
  20-mer unique DNA sequence
gggttgcttcgcgctattgc

SEQ ID NO: 1765 - DNA, 20 bp, Artificial
  20-mer unique DNA sequence
cccgcctttcactcccagcc

SEQ ID NO: 1766 - DNA, 20 bp, Artificial
  20-mer unique DNA sequence
caaagtgcggatctttgagt

SEQ ID NO: 1767 - DNA, 20 bp, Artificial
  20-mer unique DNA sequence
gcctgcccacaggctaactt

SEQ ID NO: 1768 - DNA, 20 bp, Artificial
  20-mer unique DNA sequence
caacggacgcaccacaggac

SEQ ID NO: 1769 - DNA, 20 bp, Artificial
  20-mer unique DNA sequence
gcgtgcgggaaggtgtgaaa

SEQ ID NO: 1770 - DNA, 20 bp, Artificial
  20-mer unique DNA sequence
ccggtccaataaggggctga

SEQ ID NO: 1771 - DNA, 20 bp, Artificial
  20-mer unique DNA sequence
agggagcatcggcaaatcgg

SEQ ID NO: 1772 - DNA, 20 bp, Artificial
  20-mer unique DNA sequence
ctggcgtggatgcgttcgtg

SEQ ID NO: 1773 - DNA, 20 bp, Artificial
  20-mer unique DNA sequence
aaaaaacttaccggccgcgc

SEQ ID NO: 1774 - DNA, 20 bp, Artificial
  20-mer unique DNA sequence
gcgggtgcgggtcgtttata

SEQ ID NO: 1775 - DNA, 20 bp, Artificial
  20-mer unique DNA sequence
ctgcaacgtgaaagagcggg

SEQ ID NO: 1776 - DNA, 20 bp, Artificial
  20-mer unique DNA sequence
gttcccgtttttgcgttgcc

SEQ ID NO: 1777 - DNA, 20 bp, Artificial
  20-mer unique DNA sequence
gagaagccgccccatcacat

SEQ ID NO: 1778 - DNA, 20 bp, Artificial
  20-mer unique DNA sequence
gcctaccaactcgccatgca

SEQ ID NO: 1779 - DNA, 20 bp, Artificial
  20-mer unique DNA sequence
tgggtgggcgagttgttgct

SEQ ID NO: 1780 - DNA, 20 bp, Artificial
  20-mer unique DNA sequence
cgcccgtatttgcttgtcgc

SEQ ID NO: 1781 - DNA, 20 bp, Artificial
  20-mer unique DNA sequence
cggcggggggtgacagctat

SEQ ID NO: 1782 - DNA, 20 bp, Artificial
  20-mer unique DNA sequence
ggtgtcagtggtgggggtcg

SEQ ID NO: 1783 - DNA, 20 bp, Artificial
  20-mer unique DNA sequence
gacgcgagccctacacacgg

SEQ ID NO: 1784 - DNA, 20 bp, Artificial
  20-mer unique DNA sequence
cgtttcatgaagtgcggccg

SEQ ID NO: 1785 - DNA, 20 bp, Artificial
  20-mer unique DNA sequence
atgctgtatgcgtaaggggc

SEQ ID NO: 1786 - DNA, 20 bp, Artificial
  20-mer unique DNA sequence
ttaatggatgttcgcggccc

SEQ ID NO: 1787 - DNA, 20 bp, Artificial
  20-mer unique DNA sequence
gcttgcctgttctcgctggg

SEQ ID NO: 1788 - DNA, 20 bp, Artificial
  20-mer unique DNA sequence
tagggagggcgatgcagggg

SEQ ID NO: 1789 - DNA, 20 bp, Artificial
  20-mer unique DNA sequence
tagggtatggggggacggca

SEQ ID NO: 1790 - DNA, 20 bp, Artificial
  20-mer unique DNA sequence
tgagatttgagcggggcagg

SEQ ID NO: 1791 - DNA, 20 bp, Artificial
  20-mer unique DNA sequence
accagtccgccaaatcgtcc

SEQ ID NO: 1792 - DNA, 20 bp, Artificial
  20-mer unique DNA sequence
cacccccgctacaaatcgcc

SEQ ID NO: 1793 - DNA, 20 bp, Artificial
  20-mer unique DNA sequence
atagtggcgcctggggaaga

SEQ ID NO: 1794 - DNA, 20 bp, Artificial
  20-mer unique DNA sequence
accctttgctcggccactgc

SEQ ID NO: 1795 - DNA, 20 bp, Artificial
  20-mer unique DNA sequence
gcaaaaagcacggggccata

SEQ ID NO: 1796 - DNA, 20 bp, Artificial
  20-mer unique DNA sequence
taaatgctaatcgccggtcg

SEQ ID NO: 1797 - DNA, 20 bp, Artificial
  20-mer unique DNA sequence
aaccgcccgctaagtccccc

SEQ ID NO: 1798 - DNA, 20 bp, Artificial
  20-mer unique DNA sequence
tgctcgcgcccacgtatact

SEQ ID NO: 1799 - DNA, 20 bp, Artificial
  20-mer unique DNA sequence
aagatcaaccgcctcccccc

SEQ ID NO: 1800 - DNA, 20 bp, Artificial
  20-mer unique DNA sequence
tagtgccgtgaaccccgact

SEQ ID NO: 1801 - DNA, 20 bp, Artificial
  20-mer unique DNA sequence
atccgtcacataggccggga

SEQ ID NO: 1802 - DNA, 20 bp, Artificial
  20-mer unique DNA sequence
caacccctcccgcactaccc

SEQ ID NO: 1803 - DNA, 20 bp, Artificial
  20-mer unique DNA sequence
gaggcaccgcagaaccacga

SEQ ID NO: 1804 - DNA, 20 bp, Artificial
  20-mer unique DNA sequence
caaccaaagtcagcgggcaa

SEQ ID NO: 1805 - DNA, 20 bp, Artificial
  20-mer unique DNA sequence
cgcaacccacactcggacag

SEQ ID NO: 1806 - DNA, 20 bp, Artificial
  20-mer unique DNA sequence
gcggaatgggcgtgtgtgtt

SEQ ID NO: 1807 - DNA, 20 bp, Artificial
  20-mer unique DNA sequence
tttgtggaatggggaccggg

SEQ ID NO: 1808 - DNA, 20 bp, Artificial
  20-mer unique DNA sequence
ccgcaacgacctcagcccta

SEQ ID NO: 1809 - DNA, 20 bp, Artificial
  20-mer unique DNA sequence
aaccaggggaaggtgccgag

SEQ ID NO: 1810 - DNA, 20 bp, Artificial
  20-mer unique DNA sequence
tttacgggggaacgcagggg

SEQ ID NO: 1811 - DNA, 20 bp, Artificial
  20-mer unique DNA sequence
gcgaaagggacaaggcatgc

SEQ ID NO: 1812 - DNA, 20 bp, Artificial
  20-mer unique DNA sequence
tgacggggcgagggctaagg

SEQ ID NO: 1813 - DNA, 20 bp, Artificial
  20-mer unique DNA sequence
agcatactgccccgtcaaac

SEQ ID NO: 1814 - DNA, 20 bp, Artificial
  20-mer unique DNA sequence
ccgcctgctcgccttagtcc

SEQ ID NO: 1815 - DNA, 20 bp, Artificial
  20-mer unique DNA sequence
ttgccgcttcccagactcct

SEQ ID NO: 1816 - DNA, 20 bp, Artificial
  20-mer unique DNA sequence
cacatgtctccgcgcccaag

SEQ ID NO: 1817 - DNA, 20 bp, Artificial
  20-mer unique DNA sequence
atcgccagttgccccgctta

SEQ ID NO: 1818 - DNA, 20 bp, Artificial
  20-mer unique DNA sequence
gctatccccgcgcacattcc

SEQ ID NO: 1819 - DNA, 20 bp, Artificial
  20-mer unique DNA sequence
gatcccaacgccagcagcat

SEQ ID NO: 1820 - DNA, 20 bp, Artificial
  20-mer unique DNA sequence
ctatcgccgcacaccacagg

SEQ ID NO: 1821 - DNA, 20 bp, Artificial
  20-mer unique DNA sequence
atcagtccacgcgtttgcca

SEQ ID NO: 1822 - DNA, 20 bp, Artificial
  20-mer unique DNA sequence
ggtcgcgccaaacgttcagt

SEQ ID NO: 1823 - DNA, 20 bp, Artificial
  20-mer unique DNA sequence
caccagcaaaacgcacagcg

SEQ ID NO: 1824 - DNA, 20 bp, Artificial
  20-mer unique DNA sequence
aggtaattgtcgtgcggcgg

SEQ ID NO: 1825 - DNA, 20 bp, Artificial
  20-mer unique DNA sequence
tcacagcccatcagccctcg

SEQ ID NO: 1826 - DNA, 20 bp, Artificial
  20-mer unique DNA sequence
cggaagcgcatcaggaacaa

SEQ ID NO: 1827 - DNA, 20 bp, Artificial
  20-mer unique DNA sequence
ttaatcctccggcccacccc

SEQ ID NO: 1828 - DNA, 20 bp, Artificial
  20-mer unique DNA sequence
gttgtctgttttcccgcgcc

SEQ ID NO: 1829 - DNA, 20 bp, Artificial
  20-mer unique DNA sequence
ccgtccagtcaagccgtcaa

SEQ ID NO: 1830 - DNA, 20 bp, Artificial
  20-mer unique DNA sequence
tcaactatccatggcccgta

SEQ ID NO: 1831 - DNA, 20 bp, Artificial
  20-mer unique DNA sequence
cttcggcgctgtggagttca

SEQ ID NO: 1832 - DNA, 20 bp, Artificial
  20-mer unique DNA sequence
gacaacaaccgcccgacgat

SEQ ID NO: 1833 - DNA, 20 bp, Artificial
  20-mer unique DNA sequence
cggtaagagggcacatgggc

SEQ ID NO: 1834 - DNA, 20 bp, Artificial
  20-mer unique DNA sequence
aaggtgggaagccggaggac

SEQ ID NO: 1835 - DNA, 20 bp, Artificial
  20-mer unique DNA sequence
tgtggggggatggaacgtgg

SEQ ID NO: 1836 - DNA, 20 bp, Artificial
  20-mer unique DNA sequence
gcagcacccctccgttccat

SEQ ID NO: 1837 - DNA, 20 bp, Artificial
  20-mer unique DNA sequence
acttgaggcatggggatcgg

SEQ ID NO: 1838 - DNA, 20 bp, Artificial
  20-mer unique DNA sequence
cctacccaccgcgccaaaca

SEQ ID NO: 1839 - DNA, 20 bp, Artificial
  20-mer unique DNA sequence
atggcctcgggtaacaagcg

SEQ ID NO: 1840 - DNA, 20 bp, Artificial
  20-mer unique DNA sequence
attgcgtagtccccggcctc

SEQ ID NO: 1841 - DNA, 20 bp, Artificial
  20-mer unique DNA sequence
ttccgcgcttaattgacccc

SEQ ID NO: 1842 - DNA, 20 bp, Artificial
  20-mer unique DNA sequence
gttagttggcccccgcggta

SEQ ID NO: 1843 - DNA, 20 bp, Artificial
  20-mer unique DNA sequence
ctggtgcgatcgtgtgagcg

SEQ ID NO: 1844 - DNA, 20 bp, Artificial
  20-mer unique DNA sequence
cccctatgcccaacgccact

SEQ ID NO: 1845 - DNA, 20 bp, Artificial
  20-mer unique DNA sequence
cccttggcccggttaacaca

SEQ ID NO: 1846 - DNA, 20 bp, Artificial
  20-mer unique DNA sequence
tcgcttccaattcggccgtg

SEQ ID NO: 1847 - DNA, 20 bp, Artificial
  20-mer unique DNA sequence
cgcctctcgtgtgatcgtcc

SEQ ID NO: 1848 - DNA, 20 bp, Artificial
  20-mer unique DNA sequence
gattaagccaaaagccgccg

SEQ ID NO: 1849 - DNA, 20 bp, Artificial
  20-mer unique DNA sequence
cgaaattggactgccccctc

SEQ ID NO: 1850 - DNA, 20 bp, Artificial
  20-mer unique DNA sequence
gtcccgtaacccctgcatgc

SEQ ID NO: 1851 - DNA, 20 bp, Artificial
  20-mer unique DNA sequence
ctcgaagtcccctcccgcct

SEQ ID NO: 1852 - DNA, 20 bp, Artificial
  20-mer unique DNA sequence
ggactacccacggccgcaac

SEQ ID NO: 1853 - DNA, 20 bp, Artificial
  20-mer unique DNA sequence
agcgcgcaattaacgtggaa

SEQ ID NO: 1854 - DNA, 20 bp, Artificial
  20-mer unique DNA sequence
tctcggatgggacggtggct

SEQ ID NO: 1855 - DNA, 20 bp, Artificial
  20-mer unique DNA sequence
gacaagtgaagcggggagcc

SEQ ID NO: 1856 - DNA, 20 bp, Artificial
  20-mer unique DNA sequence
tgtacgctctaggtgccacg

SEQ ID NO: 1857 - DNA, 20 bp, Artificial
  20-mer unique DNA sequence
gagactgcgtaggccgacat

SEQ ID NO: 1858 - DNA, 20 bp, Artificial
  20-mer unique DNA sequence
tcgccggagctcccttaaca

SEQ ID NO: 1859 - DNA, 20 bp, Artificial
  20-mer unique DNA sequence
ttcgctttcgttaccgggct

SEQ ID NO: 1860 - DNA, 20 bp, Artificial
  20-mer unique DNA sequence
agagagaccgagcctcgcat

SEQ ID NO: 1861 - DNA, 20 bp, Artificial
  20-mer unique DNA sequence
cgcgcaccattaagcaaccg

SEQ ID NO: 1862 - DNA, 20 bp, Artificial
  20-mer unique DNA sequence
agccacatgggatccgcctt

SEQ ID NO: 1863 - DNA, 20 bp, Artificial
  20-mer unique DNA sequence
aacggcttacctacggcctc

SEQ ID NO: 1864 - DNA, 20 bp, Artificial
  20-mer unique DNA sequence
tcaagccgatctgacgggtg

SEQ ID NO: 1865 - DNA, 20 bp, Artificial
  20-mer unique DNA sequence
ggaagtggggccgtaaagcg

SEQ ID NO: 1866 - DNA, 20 bp, Artificial
  20-mer unique DNA sequence
acgacagcgatctcctgggt

SEQ ID NO: 1867 - DNA, 20 bp, Artificial
  20-mer unique DNA sequence
tcctgtccgtatgctgtcgc

SEQ ID NO: 1868 - DNA, 20 bp, Artificial
  20-mer unique DNA sequence
tatctgcagcgctatgggcg

SEQ ID NO: 1869 - DNA, 20 bp, Artificial
  20-mer unique DNA sequence
atggcgtgcagcctgacata

SEQ ID NO: 1870 - DNA, 20 bp, Artificial
  20-mer unique DNA sequence
tcgtgctcacacggtcgatg

SEQ ID NO: 1871 - DNA, 20 bp, Artificial
  20-mer unique DNA sequence
tgactggggtggcgaggaga

SEQ ID NO: 1872 - DNA, 20 bp, Artificial
  20-mer unique DNA sequence
agcgagcgcaaggcttagga

SEQ ID NO: 1873 - DNA, 20 bp, Artificial
  20-mer unique DNA sequence
agagccgcgtagataccgct

SEQ ID NO: 1874 - DNA, 20 bp, Artificial
  20-mer unique DNA sequence
tccacggcactctctcgcat

SEQ ID NO: 1875 - DNA, 20 bp, Artificial
  20-mer unique DNA sequence
gcgactcacggaaaccccca

SEQ ID NO: 1876 - DNA, 20 bp, Artificial
  20-mer unique DNA sequence
tgacatcgctcagtcgggag

SEQ ID NO: 1877 - DNA, 20 bp, Artificial
  20-mer unique DNA sequence
tgcgaacaggtctccacgtc

SEQ ID NO: 1878 - DNA, 20 bp, Artificial
  20-mer unique DNA sequence
ccaaccgattttccaccgct

SEQ ID NO: 1879 - DNA, 20 bp, Artificial
  20-mer unique DNA sequence
tgggggatttgaggcatgga

SEQ ID NO: 1880 - DNA, 20 bp, Artificial
  20-mer unique DNA sequence
tgtgccctcccgttgccttc

SEQ ID NO: 1881 - DNA, 20 bp, Artificial
  20-mer unique DNA sequence
acatagcccaccgccaccag

SEQ ID NO: 1882 - DNA, 20 bp, Artificial
  20-mer unique DNA sequence
aggtcgacccgcgtaaaggt

SEQ ID NO: 1883 - DNA, 20 bp, Artificial
  20-mer unique DNA sequence
ttccgctcggacggattctg

SEQ ID NO: 1884 - DNA, 20 bp, Artificial
  20-mer unique DNA sequence
ggggggtagggtcaacaggg

SEQ ID NO: 1885 - DNA, 20 bp, Artificial
  20-mer unique DNA sequence
caaacgggacgccacaatca

SEQ ID NO: 1886 - DNA, 20 bp, Artificial
  20-mer unique DNA sequence
attccgccgctcccagtcag

SEQ ID NO: 1887 - DNA, 20 bp, Artificial
  20-mer unique DNA sequence
cctcccccagccgtcctttt

SEQ ID NO: 1888 - DNA, 20 bp, Artificial
  20-mer unique DNA sequence
cggttatagtcgacgggcca

SEQ ID NO: 1889 - DNA, 20 bp, Artificial
  20-mer unique DNA sequence
acacggctcgcgcatattga

SEQ ID NO: 1890 - DNA, 20 bp, Artificial
  20-mer unique DNA sequence
gaggtgggcgacagggtagg

SEQ ID NO: 1891 - DNA, 20 bp, Artificial
  20-mer unique DNA sequence
gcagggggacttggtcggtc

SEQ ID NO: 1892 - DNA, 20 bp, Artificial
  20-mer unique DNA sequence
cgagtggaacgggtgacgct

SEQ ID NO: 1893 - DNA, 20 bp, Artificial
  20-mer unique DNA sequence
tgccgttagcggtctacgga

SEQ ID NO: 1894 - DNA, 20 bp, Artificial
  20-mer unique DNA sequence
cgacgggacctaaatgcgca

SEQ ID NO: 1895 - DNA, 20 bp, Artificial
  20-mer unique DNA sequence
accgccagcaacgaataccc

SEQ ID NO: 1896 - DNA, 20 bp, Artificial
  20-mer unique DNA sequence
cgactcccgaggcataaggg

SEQ ID NO: 1897 - DNA, 20 bp, Artificial
  20-mer unique DNA sequence
acgcagccagttgccccaag

SEQ ID NO: 1898 - DNA, 20 bp, Artificial
  20-mer unique DNA sequence
atggggggcgtggttatcga

SEQ ID NO: 1899 - DNA, 20 bp, Artificial
  20-mer unique DNA sequence
gcccgcctgtctttgccaca

SEQ ID NO: 1900 - DNA, 20 bp, Artificial
  20-mer unique DNA sequence
tcgctaacctcaacgcacga

SEQ ID NO: 1901 - DNA, 20 bp, Artificial
  20-mer unique DNA sequence
acaccaccccaacagcgaag

SEQ ID NO: 1902 - DNA, 20 bp, Artificial
  20-mer unique DNA sequence
tgtccccaccgctaaccacc

SEQ ID NO: 1903 - DNA, 20 bp, Artificial
  20-mer unique DNA sequence
taccccccgcactcctacgc

SEQ ID NO: 1904 - DNA, 20 bp, Artificial
  20-mer unique DNA sequence
ttgagagctgtggtgggggc

SEQ ID NO: 1905 - DNA, 20 bp, Artificial
  20-mer unique DNA sequence
tgcatgtccaaaccctcccg

SEQ ID NO: 1906 - DNA, 20 bp, Artificial
  20-mer unique DNA sequence
cctcgcccactcaccaccag

SEQ ID NO: 1907 - DNA, 20 bp, Artificial
  20-mer unique DNA sequence
cattgcctttgacttcgccg

SEQ ID NO: 1908 - DNA, 20 bp, Artificial
  20-mer unique DNA sequence
tactgcacccccattgccgg

SEQ ID NO: 1909 - DNA, 20 bp, Artificial
  20-mer unique DNA sequence
gcccccagctaatccgaatg

SEQ ID NO: 1910 - DNA, 20 bp, Artificial
  20-mer unique DNA sequence
tcgttctggttggcgtgctg

SEQ ID NO: 1911 - DNA, 20 bp, Artificial
  20-mer unique DNA sequence
caccctcactcacgccccca

SEQ ID NO: 1912 - DNA, 20 bp, Artificial
  20-mer unique DNA sequence
tgcttgcggggttttgctcg

SEQ ID NO: 1913 - DNA, 20 bp, Artificial
  20-mer unique DNA sequence
ggccagacaagacccaacgc

SEQ ID NO: 1914 - DNA, 20 bp, Artificial
  20-mer unique DNA sequence
tcgccagttctcgcccacaa

SEQ ID NO: 1915 - DNA, 20 bp, Artificial
  20-mer unique DNA sequence
gattggggtccgacgggctt

SEQ ID NO: 1916 - DNA, 20 bp, Artificial
  20-mer unique DNA sequence
aggggcgggtgtctgcaaaa

SEQ ID NO: 1917 - DNA, 20 bp, Artificial
  20-mer unique DNA sequence
ggatgggcaggatgagctcg

SEQ ID NO: 1918 - DNA, 20 bp, Artificial
  20-mer unique DNA sequence
aaccgccaatccccagcttt

SEQ ID NO: 1919 - DNA, 20 bp, Artificial
  20-mer unique DNA sequence
ggacattgcggggggacctc

SEQ ID NO: 1920 - DNA, 20 bp, Artificial
  20-mer unique DNA sequence
ccggggttactgcgtgggac

SEQ ID NO: 1921 - DNA, 20 bp, Artificial
  20-mer unique DNA sequence
gcacgcctaacgcaaccggt

SEQ ID NO: 1922 - DNA, 20 bp, Artificial
  20-mer unique DNA sequence
tggttgagttgggcgtcgga

SEQ ID NO: 1923 - DNA, 20 bp, Artificial
  20-mer unique DNA sequence
cgcggtcgtgaagtatggcc

SEQ ID NO: 1924 - DNA, 20 bp, Artificial
  20-mer unique DNA sequence
tgccttccctcacccatccg

SEQ ID NO: 1925 - DNA, 20 bp, Artificial
  20-mer unique DNA sequence
cccccccaattcgtctgtcg

SEQ ID NO: 1926 - DNA, 20 bp, Artificial
  20-mer unique DNA sequence
tggggcaacgcaaaagcact

SEQ ID NO: 1927 - DNA, 20 bp, Artificial
  20-mer unique DNA sequence
gggccaaggtgaaagggcat

SEQ ID NO: 1928 - DNA, 20 bp, Artificial
  20-mer unique DNA sequence
ttcggtgcgcccttattcgg

SEQ ID NO: 1929 - DNA, 20 bp, Artificial
  20-mer unique DNA sequence
ctgatcccgctccaccctcg

SEQ ID NO: 1930 - DNA, 20 bp, Artificial
  20-mer unique DNA sequence
gacggggtggcaagggcata

SEQ ID NO: 1931 - DNA, 20 bp, Artificial
  20-mer unique DNA sequence
gtgatagggcggcgagaagg

SEQ ID NO: 1932 - DNA, 20 bp, Artificial
  20-mer unique DNA sequence
gcccgattttcccactgctg

SEQ ID NO: 1933 - DNA, 20 bp, Artificial
  20-mer unique DNA sequence
gaccaaaaacgacggcgcac

SEQ ID NO: 1934 - DNA, 20 bp, Artificial
  20-mer unique DNA sequence
ttgaccattagcccggagcg

SEQ ID NO: 1935 - DNA, 20 bp, Artificial
  20-mer unique DNA sequence
tcgtcgcagtcagttggggg

SEQ ID NO: 1936 - DNA, 20 bp, Artificial
  20-mer unique DNA sequence
tgacgtttcggcgccttctc

SEQ ID NO: 1937 - DNA, 20 bp, Artificial
  20-mer unique DNA sequence
gctttggccgcgtttgttgg

SEQ ID NO: 1938 - DNA, 20 bp, Artificial
  20-mer unique DNA sequence
gcatcaacacggcccccaac

SEQ ID NO: 1939 - DNA, 20 bp, Artificial
  20-mer unique DNA sequence
cgcgcccattgataccgtgt

SEQ ID NO: 1940 - DNA, 20 bp, Artificial
  20-mer unique DNA sequence
gggtggttggactgggcgat

SEQ ID NO: 1941 - DNA, 20 bp, Artificial
  20-mer unique DNA sequence
tgcttgctgggtggtttgat

SEQ ID NO: 1942 - DNA, 20 bp, Artificial
  20-mer unique DNA sequence
cgttatatgccccggcgaga

SEQ ID NO: 1943 - DNA, 20 bp, Artificial
  20-mer unique DNA sequence
tagcgctgagcccagtaggt

SEQ ID NO: 1944 - DNA, 20 bp, Artificial
  20-mer unique DNA sequence
aacggtccgggcccctaata

SEQ ID NO: 1945 - DNA, 20 bp, Artificial
  20-mer unique DNA sequence
tagtgcgcgacctctggact

SEQ ID NO: 1946 - DNA, 20 bp, Artificial
  20-mer unique DNA sequence
atcggcgcgctacgacagat

SEQ ID NO: 1947 - DNA, 20 bp, Artificial
  20-mer unique DNA sequence
tcgctccgcgaaagtaccga

SEQ ID NO: 1948 - DNA, 20 bp, Artificial
  20-mer unique DNA sequence
gcccccgccgttttgtagag

SEQ ID NO: 1949 - DNA, 20 bp, Artificial
  20-mer unique DNA sequence
atcgtaccgcaacccccgtg

SEQ ID NO: 1950 - DNA, 20 bp, Artificial
  20-mer unique DNA sequence
aggcggacggagcagggatg

SEQ ID NO: 1951 - DNA, 20 bp, Artificial
  20-mer unique DNA sequence
actaagcccgttccccgcca

SEQ ID NO: 1952 - DNA, 20 bp, Artificial
  20-mer unique DNA sequence
ttgaccatcgcctcgccttc

SEQ ID NO: 1953 - DNA, 20 bp, Artificial
  20-mer unique DNA sequence
acctcccccaacagaccgct

SEQ ID NO: 1954 - DNA, 20 bp, Artificial
  20-mer unique DNA sequence
tcgaaaagctaccgggcacg

SEQ ID NO: 1955 - DNA, 20 bp, Artificial
  20-mer unique DNA sequence
gtggtcgccccgtctttcag

SEQ ID NO: 1956 - DNA, 20 bp, Artificial
  20-mer unique DNA sequence
cctaacgggttcgctgtcca

SEQ ID NO: 1957 - DNA, 20 bp, Artificial
  20-mer unique DNA sequence
agatgagcgatgaggcccga

SEQ ID NO: 1958 - DNA, 20 bp, Artificial
  20-mer unique DNA sequence
ttgccggttggggtagcttg

SEQ ID NO: 1959 - DNA, 20 bp, Artificial
  20-mer unique DNA sequence
acaccccgaaccgcgctact

SEQ ID NO: 1960 - DNA, 20 bp, Artificial
  20-mer unique DNA sequence
atcgcccgctccaggctaac

SEQ ID NO: 1961 - DNA, 20 bp, Artificial
  20-mer unique DNA sequence
taagtgcgcgtgctgggcag

SEQ ID NO: 1962 - DNA, 20 bp, Artificial
  20-mer unique DNA sequence
gctttcgagtcatggcgcgc

SEQ ID NO: 1963 - DNA, 20 bp, Artificial
  20-mer unique DNA sequence
cgtctcgcgctcccttctcg

SEQ ID NO: 1964 - DNA, 20 bp, Artificial
  20-mer unique DNA sequence
tgtgcgtggtgtggagtgcg

SEQ ID NO: 1965 - DNA, 20 bp, Artificial
  20-mer unique DNA sequence
tgctagtgttgggtccgccg

SEQ ID NO: 1966 - DNA, 20 bp, Artificial
  20-mer unique DNA sequence
gctggatccccggactgttg

SEQ ID NO: 1967 - DNA, 20 bp, Artificial
  20-mer unique DNA sequence
tattagcttggcgccggtgg

SEQ ID NO: 1968 - DNA, 20 bp, Artificial
  20-mer unique DNA sequence
cggactggcggaactgaggg

SEQ ID NO: 1969 - DNA, 20 bp, Artificial
  20-mer unique DNA sequence
aaaggtgggcgttggtctcg

SEQ ID NO: 1970 - DNA, 20 bp, Artificial
  20-mer unique DNA sequence
taatacggctcccgccacca

SEQ ID NO: 1971 - DNA, 20 bp, Artificial
  20-mer unique DNA sequence
cgacccacttttatcgcccg

SEQ ID NO: 1972 - DNA, 20 bp, Artificial
  20-mer unique DNA sequence
gatcttgggggacgctccgg

SEQ ID NO: 1973 - DNA, 20 bp, Artificial
  20-mer unique DNA sequence
ccatgggggagcgcaagaac

SEQ ID NO: 1974 - DNA, 20 bp, Artificial
  20-mer unique DNA sequence
cccttgctaatgcccgttcg

SEQ ID NO: 1975 - DNA, 20 bp, Artificial
  20-mer unique DNA sequence
agccgcccgtcataccatca

SEQ ID NO: 1976 - DNA, 20 bp, Artificial
  20-mer unique DNA sequence
ccagcagcaacccagacccc

SEQ ID NO: 1977 - DNA, 20 bp, Artificial
  20-mer unique DNA sequence
tcattacccggaccgagcgt

SEQ ID NO: 1978 - DNA, 20 bp, Artificial
  20-mer unique DNA sequence
gactaaccgtcggggctcat

SEQ ID NO: 1979 - DNA, 20 bp, Artificial
  20-mer unique DNA sequence
tcgttagcgcggcacctatg

SEQ ID NO: 1980 - DNA, 20 bp, Artificial
  20-mer unique DNA sequence
gcttggttagtggacgcccg

SEQ ID NO: 1981 - DNA, 20 bp, Artificial
  20-mer unique DNA sequence
caggaaacattacgccgccc

SEQ ID NO: 1982 - DNA, 20 bp, Artificial
  20-mer unique DNA sequence
tggtttcaggacatggcgga

SEQ ID NO: 1983 - DNA, 20 bp, Artificial
  20-mer unique DNA sequence
agggggattgtcgaagcggg

SEQ ID NO: 1984 - DNA, 20 bp, Artificial
  20-mer unique DNA sequence
ctaggcggcacgggttcaaa

SEQ ID NO: 1985 - DNA, 20 bp, Artificial
  20-mer unique DNA sequence
cgcgccggcatattacgttt

SEQ ID NO: 1986 - DNA, 20 bp, Artificial
  20-mer unique DNA sequence
agcacaggccgcgattatga

SEQ ID NO: 1987 - DNA, 20 bp, Artificial
  20-mer unique DNA sequence
acccgggacgaagtcaagca

SEQ ID NO: 1988 - DNA, 20 bp, Artificial
  20-mer unique DNA sequence
ttccctcaagacccgcctgc

SEQ ID NO: 1989 - DNA, 20 bp, Artificial
  20-mer unique DNA sequence
aaaagtggagggggcagggg

SEQ ID NO: 1990 - DNA, 20 bp, Artificial
  20-mer unique DNA sequence
tgtttggggccggactttga

SEQ ID NO: 1991 - DNA, 20 bp, Artificial
  20-mer unique DNA sequence
gcaggcgatggacgagcagt

SEQ ID NO: 1992 - DNA, 20 bp, Artificial
  20-mer unique DNA sequence
aacgttagccgtgggcccct

SEQ ID NO: 1993 - DNA, 20 bp, Artificial
  20-mer unique DNA sequence
gtgtgcgctttgagacgggc

SEQ ID NO: 1994 - DNA, 20 bp, Artificial
  20-mer unique DNA sequence
cccctcacccacaggaccca

SEQ ID NO: 1995 - DNA, 20 bp, Artificial
  20-mer unique DNA sequence
tcgcagcccgccctttagtg

SEQ ID NO: 1996 - DNA, 20 bp, Artificial
  20-mer unique DNA sequence
ctacgcacgtgcacaatcgc

SEQ ID NO: 1997 - DNA, 20 bp, Artificial
  20-mer unique DNA sequence
acgggccgtatagagtgtgc

SEQ ID NO: 1998 - DNA, 20 bp, Artificial
  20-mer unique DNA sequence
cctcaatccgccacaagccc

SEQ ID NO: 1999 - DNA, 20 bp, Artificial
  20-mer unique DNA sequence
agggctggcgtgaggcttga

SEQ ID NO: 2000 - DNA, 20 bp, Artificial
  20-mer unique DNA sequence
ttgcgggatgcttcgagcac

SEQ ID NO: 2001 - DNA, 20 bp, Artificial
  20-mer unique DNA sequence
atctccgctagactcgccct

SEQ ID NO: 2002 - DNA, 20 bp, Artificial
  20-mer unique DNA sequence
tgcatgacaccataccgccg

SEQ ID NO: 2003 - DNA, 20 bp, Artificial
  20-mer unique DNA sequence
cgctaggccatttcggcatc

SEQ ID NO: 2004 - DNA, 20 bp, Artificial
  20-mer unique DNA sequence
ccacgggttttacggcaagc

SEQ ID NO: 2005 - DNA, 20 bp, Artificial
  20-mer unique DNA sequence
tatgccactatgccggccag

SEQ ID NO: 2006 - DNA, 20 bp, Artificial
  20-mer unique DNA sequence
cagagtgggtggctaggggc

SEQ ID NO: 2007 - DNA, 20 bp, Artificial
  20-mer unique DNA sequence
tcttcgcgccacctctcgta

SEQ ID NO: 2008 - DNA, 20 bp, Artificial
  20-mer unique DNA sequence
gggtttcacggttctgggcc

SEQ ID NO: 2009 - DNA, 20 bp, Artificial
  20-mer unique DNA sequence
atgatcgaggccgcggctaa

SEQ ID NO: 2010 - DNA, 20 bp, Artificial
  20-mer unique DNA sequence
caaatcctcccgcgtgacca

SEQ ID NO: 2011 - DNA, 20 bp, Artificial
  20-mer unique DNA sequence
gttcctcctttgcgcggttg

SEQ ID NO: 2012 - DNA, 20 bp, Artificial
  20-mer unique DNA sequence
cagccgtcgcacgctaaatg

SEQ ID NO: 2013 - DNA, 20 bp, Artificial
  20-mer unique DNA sequence
tcgtgccacgtgtgtgcttt

SEQ ID NO: 2014 - DNA, 20 bp, Artificial
  20-mer unique DNA sequence
aggacgggatgcggagagag

SEQ ID NO: 2015 - DNA, 20 bp, Artificial
  20-mer unique DNA sequence
ttgatgctggttgcttggcg

SEQ ID NO: 2016 - DNA, 20 bp, Artificial
  20-mer unique DNA sequence
gggtggactggacaggcgag

SEQ ID NO: 2017 - DNA, 20 bp, Artificial
  20-mer unique DNA sequence
acccggacacccaaaacctg

SEQ ID NO: 2018 - DNA, 20 bp, Artificial
  20-mer unique DNA sequence
cttggggccttccgtgttgg

SEQ ID NO: 2019 - DNA, 20 bp, Artificial
  20-mer unique DNA sequence
gagggcgcacggttcaggtt

SEQ ID NO: 2020 - DNA, 20 bp, Artificial
  20-mer unique DNA sequence
tccgtgccgcgtttattgtg

SEQ ID NO: 2021 - DNA, 20 bp, Artificial
  20-mer unique DNA sequence
gcgcgggatgtggtagagct

SEQ ID NO: 2022 - DNA, 20 bp, Artificial
  20-mer unique DNA sequence
atatgggtgcctggggctca

SEQ ID NO: 2023 - DNA, 20 bp, Artificial
  20-mer unique DNA sequence
acacacaccaagccgggagg

SEQ ID NO: 2024 - DNA, 20 bp, Artificial
  20-mer unique DNA sequence
cgggcggtggcgagtatgac

SEQ ID NO: 2025 - DNA, 20 bp, Artificial
  20-mer unique DNA sequence
attcacccgcatgtccgtcg

SEQ ID NO: 2026 - DNA, 20 bp, Artificial
  20-mer unique DNA sequence
gccgacctatcccgtccacc

SEQ ID NO: 2027 - DNA, 20 bp, Artificial
  20-mer unique DNA sequence
gcccaatgagcgaaccctgc

SEQ ID NO: 2028 - DNA, 20 bp, Artificial
  20-mer unique DNA sequence
tcgttcccaccgccctatct

SEQ ID NO: 2029 - DNA, 20 bp, Artificial
  20-mer unique DNA sequence
gggcataggacggcgggatt

SEQ ID NO: 2030 - DNA, 20 bp, Artificial
  20-mer unique DNA sequence
gcggtctggagttgggtggt

SEQ ID NO: 2031 - DNA, 20 bp, Artificial
  20-mer unique DNA sequence
agtgacagagggggccagga

SEQ ID NO: 2032 - DNA, 20 bp, Artificial
  20-mer unique DNA sequence
gcacggaccagtcgtgagat

SEQ ID NO: 2033 - DNA, 20 bp, Artificial
  20-mer unique DNA sequence
cgggcgtacaaagggcaaag

SEQ ID NO: 2034 - DNA, 20 bp, Artificial
  20-mer unique DNA sequence
agcaccccgccaaatcaaac

SEQ ID NO: 2035 - DNA, 20 bp, Artificial
  20-mer unique DNA sequence
aggggctcggttttaggagg

SEQ ID NO: 2036 - DNA, 20 bp, Artificial
  20-mer unique DNA sequence
tgtcgacgcatcgtgggagt

SEQ ID NO: 2037 - DNA, 20 bp, Artificial
  20-mer unique DNA sequence
cgggaagctgcaagatgcgg

SEQ ID NO: 2038 - DNA, 20 bp, Artificial
  20-mer unique DNA sequence
ttcagtccaacgcgccatcg

SEQ ID NO: 2039 - DNA, 20 bp, Artificial
  20-mer unique DNA sequence
gcggggggacgtagcaacac

SEQ ID NO: 2040 - DNA, 20 bp, Artificial
  20-mer unique DNA sequence
cccgtgtttcctcgagcctg

SEQ ID NO: 2041 - DNA, 20 bp, Artificial
  20-mer unique DNA sequence
tccgcgactgcctcctccaa

SEQ ID NO: 2042 - DNA, 20 bp, Artificial
  20-mer unique DNA sequence
cagagacaacgcccaacccc

SEQ ID NO: 2043 - DNA, 20 bp, Artificial
  20-mer unique DNA sequence
cgacaccggaggccaaatga

SEQ ID NO: 2044 - DNA, 20 bp, Artificial
  20-mer unique DNA sequence
gggtgtcaagggtgatggcg

SEQ ID NO: 2045 - DNA, 20 bp, Artificial
  20-mer unique DNA sequence
cgctgctttccgccttcacg

SEQ ID NO: 2046 - DNA, 20 bp, Artificial
  20-mer unique DNA sequence
cctcctagcgaaccggcgga

SEQ ID NO: 2047 - DNA, 20 bp, Artificial
  20-mer unique DNA sequence
gtctctcctcccatcgcccg

SEQ ID NO: 2048 - DNA, 20 bp, Artificial
  20-mer unique DNA sequence
aacacgcagtcagcggccag

SEQ ID NO: 2049 - DNA, 20 bp, Artificial
  20-mer unique DNA sequence
gcttgcgtgcgtgagagtgg

SEQ ID NO: 2050 - DNA, 20 bp, Artificial
  20-mer unique DNA sequence
tcgccttggaaccttggggc

SEQ ID NO: 2051 - DNA, 20 bp, Artificial
  20-mer unique DNA sequence
ttgtcttccccgagcttggc

SEQ ID NO: 2052 - DNA, 20 bp, Artificial
  20-mer unique DNA sequence
accaaaagcccccagcgagt

SEQ ID NO: 2053 - DNA, 20 bp, Artificial
  20-mer unique DNA sequence
agcccccccctgaagaagtg

SEQ ID NO: 2054 - DNA, 20 bp, Artificial
  20-mer unique DNA sequence
ccgttcgtccctgccacctc

SEQ ID NO: 2055 - DNA, 20 bp, Artificial
  20-mer unique DNA sequence
tggcgtgcgtgctgtgttcc

SEQ ID NO: 2056 - DNA, 20 bp, Artificial
  20-mer unique DNA sequence
tcaccctcctccgcctcgat

SEQ ID NO: 2057 - DNA, 20 bp, Artificial
  20-mer unique DNA sequence
gagtgggggcggagaagcag

SEQ ID NO: 2058 - DNA, 20 bp, Artificial
  20-mer unique DNA sequence
acacgaccttgccccagtgc

SEQ ID NO: 2059 - DNA, 20 bp, Artificial
  20-mer unique DNA sequence
accacgctagcccgtcaacg

SEQ ID NO: 2060 - DNA, 20 bp, Artificial
  20-mer unique DNA sequence
cttttgagtcttgggcgcgg

SEQ ID NO: 2061 - DNA, 20 bp, Artificial
  20-mer unique DNA sequence
ctcgttggcggctgtttcgg

SEQ ID NO: 2062 - DNA, 20 bp, Artificial
  20-mer unique DNA sequence
ttgggctgggacgttgccta

SEQ ID NO: 2063 - DNA, 20 bp, Artificial
  20-mer unique DNA sequence
aggcctcattgcgcaaccag

SEQ ID NO: 2064 - DNA, 20 bp, Artificial
  20-mer unique DNA sequence
tattccgtcgcgctgtgatc

SEQ ID NO: 2065 - DNA, 20 bp, Artificial
  20-mer unique DNA sequence
ccccgtcgatgctgttgcta

SEQ ID NO: 2066 - DNA, 20 bp, Artificial
  20-mer unique DNA sequence
gcattcacggcggctttgga

SEQ ID NO: 2067 - DNA, 20 bp, Artificial
  20-mer unique DNA sequence
ctgattttggttgtgcgcgg

SEQ ID NO: 2068 - DNA, 20 bp, Artificial
  20-mer unique DNA sequence
tgcggatgcgaaaagaaggc

SEQ ID NO: 2069 - DNA, 20 bp, Artificial
  20-mer unique DNA sequence
tgccttttagcctcccgccc

SEQ ID NO: 2070 - DNA, 20 bp, Artificial
  20-mer unique DNA sequence
caaaaatcaatgccgcgcga

SEQ ID NO: 2071 - DNA, 20 bp, Artificial
  20-mer unique DNA sequence
ccgtggcgagctttgatcag

SEQ ID NO: 2072 - DNA, 20 bp, Artificial
  20-mer unique DNA sequence
gaactgggggagcgaggtga

SEQ ID NO: 2073 - DNA, 20 bp, Artificial
  20-mer unique DNA sequence
gaaacgggggctaaactgcg

SEQ ID NO: 2074 - DNA, 20 bp, Artificial
  20-mer unique DNA sequence
tccctcacagccgcctcaac

SEQ ID NO: 2075 - DNA, 20 bp, Artificial
  20-mer unique DNA sequence
cccctcgtctttgcagctcg

SEQ ID NO: 2076 - DNA, 20 bp, Artificial
  20-mer unique DNA sequence
cgcccccctcagcacgaatt

SEQ ID NO: 2077 - DNA, 20 bp, Artificial
  20-mer unique DNA sequence
agggcgcgtggacaagggat

SEQ ID NO: 2078 - DNA, 20 bp, Artificial
  20-mer unique DNA sequence
cgtgtttagcggcgggcatc

SEQ ID NO: 2079 - DNA, 20 bp, Artificial
  20-mer unique DNA sequence
gatgcggcccccaaagaatt

SEQ ID NO: 2080 - DNA, 20 bp, Artificial
  20-mer unique DNA sequence
ggctcccccatgctacgtga

SEQ ID NO: 2081 - DNA, 20 bp, Artificial
  20-mer unique DNA sequence
gatcccaccgcgctccctgt

SEQ ID NO: 2082 - DNA, 20 bp, Artificial
  20-mer unique DNA sequence
aaacctgtggcgacacgcga

SEQ ID NO: 2083 - DNA, 20 bp, Artificial
  20-mer unique DNA sequence
atgctgacaatcggctgccc

SEQ ID NO: 2084 - DNA, 20 bp, Artificial
  20-mer unique DNA sequence
aaaaggcgcgagggtcaagg

SEQ ID NO: 2085 - DNA, 20 bp, Artificial
  20-mer unique DNA sequence
cagcgtaagacggcacctgt

SEQ ID NO: 2086 - DNA, 20 bp, Artificial
  20-mer unique DNA sequence
aagggtgggcagacgcgaac

SEQ ID NO: 2087 - DNA, 20 bp, Artificial
  20-mer unique DNA sequence
accggccttgcttgacgttt

SEQ ID NO: 2088 - DNA, 20 bp, Artificial
  20-mer unique DNA sequence
tttcattgcggtcagcggtc

SEQ ID NO: 2089 - DNA, 20 bp, Artificial
  20-mer unique DNA sequence
tgttactgggggagggcttg

SEQ ID NO: 2090 - DNA, 20 bp, Artificial
  20-mer unique DNA sequence
tggccgctcccaacctacag

SEQ ID NO: 2091 - DNA, 20 bp, Artificial
  20-mer unique DNA sequence
tcgtcagcgcctaacagggg

SEQ ID NO: 2092 - DNA, 20 bp, Artificial
  20-mer unique DNA sequence
cctctttctggccgaccccg

SEQ ID NO: 2093 - DNA, 20 bp, Artificial
  20-mer unique DNA sequence
attcgtatctgccgcgcccc

SEQ ID NO: 2094 - DNA, 20 bp, Artificial
  20-mer unique DNA sequence
tgcgccgcttcacgaaataa

SEQ ID NO: 2095 - DNA, 20 bp, Artificial
  20-mer unique DNA sequence
gtcttcacccccccaccgag

SEQ ID NO: 2096 - DNA, 20 bp, Artificial
  20-mer unique DNA sequence
tctgtaggccgcggatggac

SEQ ID NO: 2097 - DNA, 20 bp, Artificial
  20-mer unique DNA sequence
cagcccgcctcctccttcac

SEQ ID NO: 2098 - DNA, 20 bp, Artificial
  20-mer unique DNA sequence
aaatggcaggcaagtcggct

SEQ ID NO: 2099 - DNA, 20 bp, Artificial
  20-mer unique DNA sequence
cttttccatgagtcccccgc

SEQ ID NO: 2100 - DNA, 20 bp, Artificial
  20-mer unique DNA sequence
cgacagaaacccgcagccct

SEQ ID NO: 2101 - DNA, 20 bp, Artificial
  20-mer unique DNA sequence
tttccacttttccgcgcctc

SEQ ID NO: 2102 - DNA, 20 bp, Artificial
  20-mer unique DNA sequence
acggcgctcctctggttgtg

SEQ ID NO: 2103 - DNA, 20 bp, Artificial
  20-mer unique DNA sequence
tttggagggggtcgggagaa

SEQ ID NO: 2104 - DNA, 20 bp, Artificial
  20-mer unique DNA sequence
ggcgatggagggcagaggac

SEQ ID NO: 2105 - DNA, 20 bp, Artificial
  20-mer unique DNA sequence
gggcggttgttggcgagagt

SEQ ID NO: 2106 - DNA, 20 bp, Artificial
  20-mer unique DNA sequence
ggtcttgttggcggattggc

SEQ ID NO: 2107 - DNA, 20 bp, Artificial
  20-mer unique DNA sequence
agttctcccacccccgttgc

SEQ ID NO: 2108 - DNA, 20 bp, Artificial
  20-mer unique DNA sequence
actgtgcggcgatgtaggtc

SEQ ID NO: 2109 - DNA, 20 bp, Artificial
  20-mer unique DNA sequence
catgtgcgaggtctggggaa

SEQ ID NO: 2110 - DNA, 20 bp, Artificial
  20-mer unique DNA sequence
tctctccgccgccaccctct

SEQ ID NO: 2111 - DNA, 20 bp, Artificial
  20-mer unique DNA sequence
tgaggtggcgtttgctgctc

SEQ ID NO: 2112 - DNA, 20 bp, Artificial
  20-mer unique DNA sequence
ctcaacccagccccaaacgg

SEQ ID NO: 2113 - DNA, 20 bp, Artificial
  20-mer unique DNA sequence
cccctacacatgcaacccgc

SEQ ID NO: 2114 - DNA, 20 bp, Artificial
  20-mer unique DNA sequence
cgagccctttctgaccctgc

SEQ ID NO: 2115 - DNA, 20 bp, Artificial
  20-mer unique DNA sequence
tccgaggaatgcataacgcg

SEQ ID NO: 2116 - DNA, 20 bp, Artificial
  20-mer unique DNA sequence
acacttgcccgcccgattaa

SEQ ID NO: 2117 - DNA, 20 bp, Artificial
  20-mer unique DNA sequence
tccttgcttcgggtgcttgg

SEQ ID NO: 2118 - DNA, 20 bp, Artificial
  20-mer unique DNA sequence
ccccttgtgaaacccatgcc

SEQ ID NO: 2119 - DNA, 20 bp, Artificial
  20-mer unique DNA sequence
ccccccttgttcccttcgac

SEQ ID NO: 2120 - DNA, 20 bp, Artificial
  20-mer unique DNA sequence
tcggtgtaatgtaggcgcgg

SEQ ID NO: 2121 - DNA, 20 bp, Artificial
  20-mer unique DNA sequence
ggatttcgcggggaggctta

SEQ ID NO: 2122 - DNA, 20 bp, Artificial
  20-mer unique DNA sequence
tagacgggacaagcggcgaa

SEQ ID NO: 2123 - DNA, 20 bp, Artificial
  20-mer unique DNA sequence
gttcgtgcgggttgggagtc

SEQ ID NO: 2124 - DNA, 20 bp, Artificial
  20-mer unique DNA sequence
gtgggtagctccgaacagca

SEQ ID NO: 2125 - DNA, 20 bp, Artificial
  20-mer unique DNA sequence
agggtgactgacccgagcaa

SEQ ID NO: 2126 - DNA, 20 bp, Artificial
  20-mer unique DNA sequence
gggcggccaacatctcgtgt

SEQ ID NO: 2127 - DNA, 20 bp, Artificial
  20-mer unique DNA sequence
ctttcgctttagtcccgcgg

SEQ ID NO: 2128 - DNA, 20 bp, Artificial
  20-mer unique DNA sequence
gagggcaaaacgaccgccta

SEQ ID NO: 2129 - DNA, 20 bp, Artificial
  20-mer unique DNA sequence
aacatcaccgcctccgcaaa

SEQ ID NO: 2130 - DNA, 20 bp, Artificial
  20-mer unique DNA sequence
cactttgtacccgccacgcc

SEQ ID NO: 2131 - DNA, 20 bp, Artificial
  20-mer unique DNA sequence
ccgcgtcccatcgtttgttg

SEQ ID NO: 2132 - DNA, 20 bp, Artificial
  20-mer unique DNA sequence
attaactgggcgggatcggc

SEQ ID NO: 2133 - DNA, 20 bp, Artificial
  20-mer unique DNA sequence
gaggacggcgaacgaaagcg

SEQ ID NO: 2134 - DNA, 20 bp, Artificial
  20-mer unique DNA sequence
gaccgcattcgccccttttt

SEQ ID NO: 2135 - DNA, 20 bp, Artificial
  20-mer unique DNA sequence
tctggggtcaaggcggaagt

SEQ ID NO: 2136 - DNA, 20 bp, Artificial
  20-mer unique DNA sequence
caccccccctctttttccgc

SEQ ID NO: 2137 - DNA, 20 bp, Artificial
  20-mer unique DNA sequence
ggaggtcggggtttgtgtgc

SEQ ID NO: 2138 - DNA, 20 bp, Artificial
  20-mer unique DNA sequence
gcaaccgcggctcctactgt

SEQ ID NO: 2139 - DNA, 20 bp, Artificial
  20-mer unique DNA sequence
agcagccaacaccgccaaag

SEQ ID NO: 2140 - DNA, 20 bp, Artificial
  20-mer unique DNA sequence
ttcgtgtcctcgcgttgcaa

SEQ ID NO: 2141 - DNA, 20 bp, Artificial
  20-mer unique DNA sequence
gaagcgtaaggccggcagac

SEQ ID NO: 2142 - DNA, 20 bp, Artificial
  20-mer unique DNA sequence
cccaattatccacgggggca

SEQ ID NO: 2143 - DNA, 20 bp, Artificial
  20-mer unique DNA sequence
ctgttggggtcgtctgccgg

SEQ ID NO: 2144 - DNA, 20 bp, Artificial
  20-mer unique DNA sequence
tggatgcgtgggggatgaac

SEQ ID NO: 2145 - DNA, 20 bp, Artificial
  20-mer unique DNA sequence
ttcgtcccttggctcttccg

SEQ ID NO: 2146 - DNA, 20 bp, Artificial
  20-mer unique DNA sequence
accaccacgagcacagacgc

SEQ ID NO: 2147 - DNA, 20 bp, Artificial
  20-mer unique DNA sequence
gaagggaaaccgcaagccac

SEQ ID NO: 2148 - DNA, 20 bp, Artificial
  20-mer unique DNA sequence
gagccgcgccgaatgaagat

SEQ ID NO: 2149 - DNA, 20 bp, Artificial
  20-mer unique DNA sequence
agcccgcacagacccaaaac

SEQ ID NO: 2150 - DNA, 20 bp, Artificial
  20-mer unique DNA sequence
ttctccgcgtcaaatcggtg

SEQ ID NO: 2151 - DNA, 20 bp, Artificial
  20-mer unique DNA sequence
gttcggccgcactacggact

SEQ ID NO: 2152 - DNA, 20 bp, Artificial
  20-mer unique DNA sequence
agtcctggcctgacacttcg

SEQ ID NO: 2153 - DNA, 20 bp, Artificial
  20-mer unique DNA sequence
tgatcttactgcgggccgtt

SEQ ID NO: 2154 - DNA, 20 bp, Artificial
  20-mer unique DNA sequence
aagggcggtttcagtggcag

SEQ ID NO: 2155 - DNA, 20 bp, Artificial
  20-mer unique DNA sequence
cgttcctccacacccagcct

SEQ ID NO: 2156 - DNA, 20 bp, Artificial
  20-mer unique DNA sequence
ttcgtggcggttgtggtttg

SEQ ID NO: 2157 - DNA, 20 bp, Artificial
  20-mer unique DNA sequence
tcccgcattccgtcccattc

SEQ ID NO: 2158 - DNA, 20 bp, Artificial
  20-mer unique DNA sequence
gcacgccccctataccccag

SEQ ID NO: 2159 - DNA, 20 bp, Artificial
  20-mer unique DNA sequence
cggtgggcaaggacatacga

SEQ ID NO: 2160 - DNA, 20 bp, Artificial
  20-mer unique DNA sequence
tggctggcggtattgttgca

SEQ ID NO: 2161 - DNA, 20 bp, Artificial
  20-mer unique DNA sequence
cgaaaaggggggggggtaat

SEQ ID NO: 2162 - DNA, 20 bp, Artificial
  20-mer unique DNA sequence
ccccagccgattagcccgta

SEQ ID NO: 2163 - DNA, 20 bp, Artificial
  20-mer unique DNA sequence
cacttcgcttccctgtcgct

SEQ ID NO: 2164 - DNA, 20 bp, Artificial
  20-mer unique DNA sequence
ttcagatggtgcgcttcccg

SEQ ID NO: 2165 - DNA, 20 bp, Artificial
  20-mer unique DNA sequence
ttaacccacttccagccccg

SEQ ID NO: 2166 - DNA, 20 bp, Artificial
  20-mer unique DNA sequence
caagagcccccgagaccagc

SEQ ID NO: 2167 - DNA, 20 bp, Artificial
  20-mer unique DNA sequence
gtttcatccgcgcactcccg

SEQ ID NO: 2168 - DNA, 20 bp, Artificial
  20-mer unique DNA sequence
ggggtcgggaaaggtctggc

SEQ ID NO: 2169 - DNA, 20 bp, Artificial
  20-mer unique DNA sequence
ccaaccgcactttccgccta

SEQ ID NO: 2170 - DNA, 20 bp, Artificial
  20-mer unique DNA sequence
accaactgccacgaaagtcc

SEQ ID NO: 2171 - DNA, 20 bp, Artificial
  20-mer unique DNA sequence
tacaccctactcccccgcga

SEQ ID NO: 2172 - DNA, 20 bp, Artificial
  20-mer unique DNA sequence
cgtgccctctatgtcccgcc

SEQ ID NO: 2173 - DNA, 20 bp, Artificial
  20-mer unique DNA sequence
ctcctcgggcaacgcgctac

SEQ ID NO: 2174 - DNA, 20 bp, Artificial
  20-mer unique DNA sequence
gacgagattgtggggcgctt

SEQ ID NO: 2175 - DNA, 20 bp, Artificial
  20-mer unique DNA sequence
acaatgcgggtctggcggtc

SEQ ID NO: 2176 - DNA, 20 bp, Artificial
  20-mer unique DNA sequence
tgtcctcctgccgtgttgcc

SEQ ID NO: 2177 - DNA, 20 bp, Artificial
  20-mer unique DNA sequence
tgctgcagtctgacacgtcc

SEQ ID NO: 2178 - DNA, 20 bp, Artificial
  20-mer unique DNA sequence
catcccccaacagacaggcg

SEQ ID NO: 2179 - DNA, 20 bp, Artificial
  20-mer unique DNA sequence
ttcaatggccggagggtttc

SEQ ID NO: 2180 - DNA, 20 bp, Artificial
  20-mer unique DNA sequence
ttttcgccccacattttgca

SEQ ID NO: 2181 - DNA, 20 bp, Artificial
  20-mer unique DNA sequence
cggtctcgcttcgcctatcc

SEQ ID NO: 2182 - DNA, 20 bp, Artificial
  20-mer unique DNA sequence
cgcggggcagaaccttgata

SEQ ID NO: 2183 - DNA, 20 bp, Artificial
  20-mer unique DNA sequence
ggggtcaggggcaacggaat

SEQ ID NO: 2184 - DNA, 20 bp, Artificial
  20-mer unique DNA sequence
aaacagacaaccgccccgtc

SEQ ID NO: 2185 - DNA, 20 bp, Artificial
  20-mer unique DNA sequence
ctaccgacgccaacacccct

SEQ ID NO: 2186 - DNA, 20 bp, Artificial
  20-mer unique DNA sequence
aggggcgaaaaggaatgcgt

SEQ ID NO: 2187 - DNA, 20 bp, Artificial
  20-mer unique DNA sequence
gtacccacaatgccaccgcc

SEQ ID NO: 2188 - DNA, 20 bp, Artificial
  20-mer unique DNA sequence
tctttctccgcacccccagc

SEQ ID NO: 2189 - DNA, 20 bp, Artificial
  20-mer unique DNA sequence
gaaagtcccgtcgccatgct

SEQ ID NO: 2190 - DNA, 20 bp, Artificial
  20-mer unique DNA sequence
tcagaacacccccagaggat

SEQ ID NO: 2191 - DNA, 20 bp, Artificial
  20-mer unique DNA sequence
cctcccttcccatcgtgcca

SEQ ID NO: 2192 - DNA, 20 bp, Artificial
  20-mer unique DNA sequence
ttcggggggctgtagtgacc

SEQ ID NO: 2193 - DNA, 20 bp, Artificial
  20-mer unique DNA sequence
attcgcgttgcactccccat

SEQ ID NO: 2194 - DNA, 20 bp, Artificial
  20-mer unique DNA sequence
gaaggcgacgggagggtcat

SEQ ID NO: 2195 - DNA, 20 bp, Artificial
  20-mer unique DNA sequence
ccgcaaagcactccactcca

SEQ ID NO: 2196 - DNA, 20 bp, Artificial
  20-mer unique DNA sequence
gctcgttagtcaccagcgga

SEQ ID NO: 2197 - DNA, 20 bp, Artificial
  20-mer unique DNA sequence
cacccatcccactccagccg

SEQ ID NO: 2198 - DNA, 20 bp, Artificial
  20-mer unique DNA sequence
ggaaagggtgcgataagcgg

SEQ ID NO: 2199 - DNA, 20 bp, Artificial
  20-mer unique DNA sequence
ccccacattactcgcacccg

SEQ ID NO: 2200 - DNA, 20 bp, Artificial
  20-mer unique DNA sequence
gcgcaggaatacaagggccg

SEQ ID NO: 2201 - DNA, 20 bp, Artificial
  20-mer unique DNA sequence
tcggattggcttagggtggt

SEQ ID NO: 2202 - DNA, 20 bp, Artificial
  20-mer unique DNA sequence
tccgggtaggtcacgagcgt

SEQ ID NO: 2203 - DNA, 20 bp, Artificial
  20-mer unique DNA sequence
cgtgggtcgaaatggccatg

SEQ ID NO: 2204 - DNA, 20 bp, Artificial
  20-mer unique DNA sequence
ctccaagacgcgccaacaga

SEQ ID NO: 2205 - DNA, 20 bp, Artificial
  20-mer unique DNA sequence
atccttcctgcggctacccg

SEQ ID NO: 2206 - DNA, 20 bp, Artificial
  20-mer unique DNA sequence
actgccgcccaatccaagag

SEQ ID NO: 2207 - DNA, 20 bp, Artificial
  20-mer unique DNA sequence
accgccaccgtaaatccgcc

SEQ ID NO: 2208 - DNA, 20 bp, Artificial
  20-mer unique DNA sequence
tcctgctcgccacccctcaa

SEQ ID NO: 2209 - DNA, 20 bp, Artificial
  20-mer unique DNA sequence
acgcggaggggatcttggga

SEQ ID NO: 2210 - DNA, 20 bp, Artificial
  20-mer unique DNA sequence
gtagttggaccctggcggcg

SEQ ID NO: 2211 - DNA, 20 bp, Artificial
  20-mer unique DNA sequence
ggattgcgcttccatgtgcg

SEQ ID NO: 2212 - DNA, 20 bp, Artificial
  20-mer unique DNA sequence
attccgtggacaccccccag

SEQ ID NO: 2213 - DNA, 20 bp, Artificial
  20-mer unique DNA sequence
tcggcgcttggctttttgtt

SEQ ID NO: 2214 - DNA, 20 bp, Artificial
  20-mer unique DNA sequence
tacccacggccggaatgaac

SEQ ID NO: 2215 - DNA, 20 bp, Artificial
  20-mer unique DNA sequence
ggggtattggccagggggtt

SEQ ID NO: 2216 - DNA, 20 bp, Artificial
  20-mer unique DNA sequence
cacgagggaacgggctgagg

SEQ ID NO: 2217 - DNA, 20 bp, Artificial
  20-mer unique DNA sequence
cttgcctcgcgtctgccctt

SEQ ID NO: 2218 - DNA, 20 bp, Artificial
  20-mer unique DNA sequence
cgtgcttgacttgccccgac

SEQ ID NO: 2219 - DNA, 20 bp, Artificial
  20-mer unique DNA sequence
tccctcccggttcagtcgcc

SEQ ID NO: 2220 - DNA, 20 bp, Artificial
  20-mer unique DNA sequence
cggggccatagaacaagcga

SEQ ID NO: 2221 - DNA, 20 bp, Artificial
  20-mer unique DNA sequence
ctttcgcctagcctcgccat

SEQ ID NO: 2222 - DNA, 20 bp, Artificial
  20-mer unique DNA sequence
gttggggagggcgtcgtcgg

SEQ ID NO: 2223 - DNA, 20 bp, Artificial
  20-mer unique DNA sequence
tacctgggatggggggaccg

SEQ ID NO: 2224 - DNA, 20 bp, Artificial
  20-mer unique DNA sequence
atactcccaaccacgcagga

SEQ ID NO: 2225 - DNA, 20 bp, Artificial
  20-mer unique DNA sequence
tgcgggttcaatacgggtgc

SEQ ID NO: 2226 - DNA, 20 bp, Artificial
  20-mer unique DNA sequence
cacatgcatcgaccccaagc

SEQ ID NO: 2227 - DNA, 20 bp, Artificial
  20-mer unique DNA sequence
ctgttctacgccggctcttc

SEQ ID NO: 2228 - DNA, 20 bp, Artificial
  20-mer unique DNA sequence
tcgttggggcgtttgtggac

SEQ ID NO: 2229 - DNA, 20 bp, Artificial
  20-mer unique DNA sequence
acgtggtgggggggtggacg

SEQ ID NO: 2230 - DNA, 20 bp, Artificial
  20-mer unique DNA sequence
gatggcgtggcggaagtacc

SEQ ID NO: 2231 - DNA, 20 bp, Artificial
  20-mer unique DNA sequence
ttgaacacagtggcgcggga

SEQ ID NO: 2232 - DNA, 20 bp, Artificial
  20-mer unique DNA sequence
gcagagctacaggtcgcgta

SEQ ID NO: 2233 - DNA, 20 bp, Artificial
  20-mer unique DNA sequence
gtcgtgacagtgctctcgct

SEQ ID NO: 2234 - DNA, 20 bp, Artificial
  20-mer unique DNA sequence
ctgttcggttggtcacgggt

SEQ ID NO: 2235 - DNA, 20 bp, Artificial
  20-mer unique DNA sequence
cctgctccgtgaagtcccgt

SEQ ID NO: 2236 - DNA, 20 bp, Artificial
  20-mer unique DNA sequence
cgccactcccttgcctcaat

SEQ ID NO: 2237 - DNA, 20 bp, Artificial
  20-mer unique DNA sequence
tgtgccccccgtgtccttag

SEQ ID NO: 2238 - DNA, 20 bp, Artificial
  20-mer unique DNA sequence
tctgatggactggagcgcgc

SEQ ID NO: 2239 - DNA, 20 bp, Artificial
  20-mer unique DNA sequence
ggaccagcaggagcccacaa

SEQ ID NO: 2240 - DNA, 20 bp, Artificial
  20-mer unique DNA sequence
tcttcctggcacgcttgtcg

SEQ ID NO: 2241 - DNA, 20 bp, Artificial
  20-mer unique DNA sequence
tccctccgccgcaatcataa

SEQ ID NO: 2242 - DNA, 20 bp, Artificial
  20-mer unique DNA sequence
agaagaaaagcaccccagcg

SEQ ID NO: 2243 - DNA, 20 bp, Artificial
  20-mer unique DNA sequence
cggttcggcacgtcttctca

SEQ ID NO: 2244 - DNA, 20 bp, Artificial
  20-mer unique DNA sequence
taccgcccccgcattctctg

SEQ ID NO: 2245 - DNA, 20 bp, Artificial
  20-mer unique DNA sequence
tcccccttcgtgagcctttg

SEQ ID NO: 2246 - DNA, 20 bp, Artificial
  20-mer unique DNA sequence
tgcgaattggtggccggtag

SEQ ID NO: 2247 - DNA, 20 bp, Artificial
  20-mer unique DNA sequence
aaatgcttggaggcgtcggg

SEQ ID NO: 2248 - DNA, 20 bp, Artificial
  20-mer unique DNA sequence
aactcccctaatccgcctgc

SEQ ID NO: 2249 - DNA, 20 bp, Artificial
  20-mer unique DNA sequence
cacgacgcccacgacctacg

SEQ ID NO: 2250 - DNA, 20 bp, Artificial
  20-mer unique DNA sequence
tattcgtgccccccgttctc

SEQ ID NO: 2251 - DNA, 20 bp, Artificial
  20-mer unique DNA sequence
ggtagcaatctggggaggcg

SEQ ID NO: 2252 - DNA, 20 bp, Artificial
  20-mer unique DNA sequence
gcacacccaagcgcaagcaa

SEQ ID NO: 2253 - DNA, 20 bp, Artificial
  20-mer unique DNA sequence
aggtcccgcgcagaattcaa

SEQ ID NO: 2254 - DNA, 20 bp, Artificial
  20-mer unique DNA sequence
tctttgcgcgctgaaccctg

SEQ ID NO: 2255 - DNA, 20 bp, Artificial
  20-mer unique DNA sequence
gtcttgcctggagcccctgc

SEQ ID NO: 2256 - DNA, 20 bp, Artificial
  20-mer unique DNA sequence
tgggagggggcacagaccag

SEQ ID NO: 2257 - DNA, 20 bp, Artificial
  20-mer unique DNA sequence
ctcccacagtcatggcccca

SEQ ID NO: 2258 - DNA, 20 bp, Artificial
  20-mer unique DNA sequence
cggcgaggctgagggatttc

SEQ ID NO: 2259 - DNA, 20 bp, Artificial
  20-mer unique DNA sequence
cccggcgcgtcttgatacca

SEQ ID NO: 2260 - DNA, 20 bp, Artificial
  20-mer unique DNA sequence
tgcctgtcgttcgtcgttcc

SEQ ID NO: 2261 - DNA, 20 bp, Artificial
  20-mer unique DNA sequence
tcggaggaatagcaaggcaa

SEQ ID NO: 2262 - DNA, 20 bp, Artificial
  20-mer unique DNA sequence
tatgtgccccttgcctgctg

SEQ ID NO: 2263 - DNA, 20 bp, Artificial
  20-mer unique DNA sequence
aacacggggaaggtagcgga

SEQ ID NO: 2264 - DNA, 20 bp, Artificial
  20-mer unique DNA sequence
atttatctcggcccgccctc

SEQ ID NO: 2265 - DNA, 20 bp, Artificial
  20-mer unique DNA sequence
tgcgaaactaggcgtgagcc

SEQ ID NO: 2266 - DNA, 20 bp, Artificial
  20-mer unique DNA sequence
gccgcaccagccgttatcag

SEQ ID NO: 2267 - DNA, 20 bp, Artificial
  20-mer unique DNA sequence
tagcttgcggatggtgaggc

SEQ ID NO: 2268 - DNA, 20 bp, Artificial
  20-mer unique DNA sequence
taggccaaaaccgcgtgatg

SEQ ID NO: 2269 - DNA, 20 bp, Artificial
  20-mer unique DNA sequence
acgtcaggccgcagcatttt

SEQ ID NO: 2270 - DNA, 20 bp, Artificial
  20-mer unique DNA sequence
cgtcgttcccgatttcccct

SEQ ID NO: 2271 - DNA, 20 bp, Artificial
  20-mer unique DNA sequence
accatcgccgcgccgtttat

SEQ ID NO: 2272 - DNA, 20 bp, Artificial
  20-mer unique DNA sequence
atttgtctcccggcgtgcta

SEQ ID NO: 2273 - DNA, 20 bp, Artificial
  20-mer unique DNA sequence
tatccctgcgtgacgaccct

SEQ ID NO: 2274 - DNA, 20 bp, Artificial
  20-mer unique DNA sequence
tccctacagacccgccccaa

SEQ ID NO: 2275 - DNA, 20 bp, Artificial
  20-mer unique DNA sequence
aaacaaaaccgccagcccga

SEQ ID NO: 2276 - DNA, 20 bp, Artificial
  20-mer unique DNA sequence
ctgccccgtctccttgttgc

SEQ ID NO: 2277 - DNA, 20 bp, Artificial
  20-mer unique DNA sequence
tttacccccaacccctccct

SEQ ID NO: 2278 - DNA, 20 bp, Artificial
  20-mer unique DNA sequence
aaccacgcccgccttctgat

SEQ ID NO: 2279 - DNA, 20 bp, Artificial
  20-mer unique DNA sequence
aaccttcttgggggcaggct

SEQ ID NO: 2280 - DNA, 20 bp, Artificial
  20-mer unique DNA sequence
cccattttactcgcccgtcg

SEQ ID NO: 2281 - DNA, 20 bp, Artificial
  20-mer unique DNA sequence
cacccgcagccctttgagtt

SEQ ID NO: 2282 - DNA, 20 bp, Artificial
  20-mer unique DNA sequence
cacagcacccctgaagccca

SEQ ID NO: 2283 - DNA, 20 bp, Artificial
  20-mer unique DNA sequence
caagcaccgcaactagccgc

SEQ ID NO: 2284 - DNA, 20 bp, Artificial
  20-mer unique DNA sequence
gcatttggcgccgagtcatt

SEQ ID NO: 2285 - DNA, 20 bp, Artificial
  20-mer unique DNA sequence
tccatcccagttcccagcgc

SEQ ID NO: 2286 - DNA, 20 bp, Artificial
  20-mer unique DNA sequence
tgtgctgggattgcggattg

SEQ ID NO: 2287 - DNA, 20 bp, Artificial
  20-mer unique DNA sequence
ggaatgtggcataacggcga

SEQ ID NO: 2288 - DNA, 20 bp, Artificial
  20-mer unique DNA sequence
aggcccaccaaccacgcttt

SEQ ID NO: 2289 - DNA, 20 bp, Artificial
  20-mer unique DNA sequence
ggttgtgggctgtgatgggc

SEQ ID NO: 2290 - DNA, 20 bp, Artificial
  20-mer unique DNA sequence
atcgggggggttgtttgtcg

SEQ ID NO: 2291 - DNA, 20 bp, Artificial
  20-mer unique DNA sequence
acgcggggaggagtgtacga

SEQ ID NO: 2292 - DNA, 20 bp, Artificial
  20-mer unique DNA sequence
ggctttacgctcgtgtgggg

SEQ ID NO: 2293 - DNA, 20 bp, Artificial
  20-mer unique DNA sequence
atgcttcccttcgtccgcct

SEQ ID NO: 2294 - DNA, 20 bp, Artificial
  20-mer unique DNA sequence
tatcccccccgtgtttgtgc

SEQ ID NO: 2295 - DNA, 20 bp, Artificial
  20-mer unique DNA sequence
cgcaaccccgctgacattta

SEQ ID NO: 2296 - DNA, 20 bp, Artificial
  20-mer unique DNA sequence
cgacgccatcttacccccct

SEQ ID NO: 2297 - DNA, 20 bp, Artificial
  20-mer unique DNA sequence
gccaaagcaatcagcgcaaa

SEQ ID NO: 2298 - DNA, 20 bp, Artificial
  20-mer unique DNA sequence
tctaccccctccgtccgatg

SEQ ID NO: 2299 - DNA, 20 bp, Artificial
  20-mer unique DNA sequence
gctagctgcccccccttcat

SEQ ID NO: 2300 - DNA, 20 bp, Artificial
  20-mer unique DNA sequence
cccagctttccgtttgcacc

SEQ ID NO: 2301 - DNA, 20 bp, Artificial
  20-mer unique DNA sequence
tcggggagtggggaacaacg

SEQ ID NO: 2302 - DNA, 20 bp, Artificial
  20-mer unique DNA sequence
tgccacaccgcgtcgaatct

SEQ ID NO: 2303 - DNA, 20 bp, Artificial
  20-mer unique DNA sequence
ataccgggaagcattgggcc

SEQ ID NO: 2304 - DNA, 20 bp, Artificial
  20-mer unique DNA sequence
ccgataggatggcgcaaacg

SEQ ID NO: 2305 - DNA, 20 bp, Artificial
  20-mer unique DNA sequence
tctagggcgctcggaatggc

SEQ ID NO: 2306 - DNA, 20 bp, Artificial
  20-mer unique DNA sequence
gaaccgacgcaaacccctga

SEQ ID NO: 2307 - DNA, 20 bp, Artificial
  20-mer unique DNA sequence
gggaaccggccaccaacaac

SEQ ID NO: 2308 - DNA, 20 bp, Artificial
  20-mer unique DNA sequence
gtgcggggtagtcgggggag

SEQ ID NO: 2309 - DNA, 20 bp, Artificial
  20-mer unique DNA sequence
ccgcgtgacatttgggctct

SEQ ID NO: 2310 - DNA, 20 bp, Artificial
  20-mer unique DNA sequence
ttcacctcgctggcctcgct

SEQ ID NO: 2311 - DNA, 20 bp, Artificial
  20-mer unique DNA sequence
agaattgaaggccccccgtc

SEQ ID NO: 2312 - DNA, 20 bp, Artificial
  20-mer unique DNA sequence
atcgttacaacccggtcgcc

SEQ ID NO: 2313 - DNA, 20 bp, Artificial
  20-mer unique DNA sequence
aaatggtgcggtcatgcggt

SEQ ID NO: 2314 - DNA, 20 bp, Artificial
  20-mer unique DNA sequence
cgcccagacaccacctccca

SEQ ID NO: 2315 - DNA, 20 bp, Artificial
  20-mer unique DNA sequence
tcgggagttttcgggatgga

SEQ ID NO: 2316 - DNA, 20 bp, Artificial
  20-mer unique DNA sequence
gggcggtttgcgaagaatgt

SEQ ID NO: 2317 - DNA, 20 bp, Artificial
  20-mer unique DNA sequence
cgaaggaggatggagcggcc

SEQ ID NO: 2318 - DNA, 20 bp, Artificial
  20-mer unique DNA sequence
gcattgttgcacacgggacc

SEQ ID NO: 2319 - DNA, 20 bp, Artificial
  20-mer unique DNA sequence
gttgcgggcgtagcctgggt

SEQ ID NO: 2320 - DNA, 20 bp, Artificial
  20-mer unique DNA sequence
acgcctatctacgtgcgacc

SEQ ID NO: 2321 - DNA, 20 bp, Artificial
  20-mer unique DNA sequence
agggcaccggacgaactgat

SEQ ID NO: 2322 - DNA, 20 bp, Artificial
  20-mer unique DNA sequence
ggacgttccccacctagcga

SEQ ID NO: 2323 - DNA, 20 bp, Artificial
  20-mer unique DNA sequence
tggcgatggattggaatgga

SEQ ID NO: 2324 - DNA, 20 bp, Artificial
  20-mer unique DNA sequence
ggctgaactgctccctacaa

SEQ ID NO: 2325 - DNA, 20 bp, Artificial
  20-mer unique DNA sequence
ggtggcactcggctgtacaa

SEQ ID NO: 2326 - DNA, 20 bp, Artificial
  20-mer unique DNA sequence
gtagatccgaccctggggca

SEQ ID NO: 2327 - DNA, 20 bp, Artificial
  20-mer unique DNA sequence
gtgtttacctacccgcgccc

SEQ ID NO: 2328 - DNA, 20 bp, Artificial
  20-mer unique DNA sequence
cagcgcggttggaatgaggc

SEQ ID NO: 2329 - DNA, 20 bp, Artificial
  20-mer unique DNA sequence
gccctgcttgcgctctgtcc

SEQ ID NO: 2330 - DNA, 20 bp, Artificial
  20-mer unique DNA sequence
ctcgcccacgttcaccctgt

SEQ ID NO: 2331 - DNA, 20 bp, Artificial
  20-mer unique DNA sequence
tttgtgggccgcggacttat

SEQ ID NO: 2332 - DNA, 20 bp, Artificial
  20-mer unique DNA sequence
aggctgcgtttgcgggaatg

SEQ ID NO: 2333 - DNA, 20 bp, Artificial
  20-mer unique DNA sequence
ggccgcgtctctccgttaac

SEQ ID NO: 2334 - DNA, 20 bp, Artificial
  20-mer unique DNA sequence
gcactgcgctgcatggtatc

SEQ ID NO: 2335 - DNA, 20 bp, Artificial
  20-mer unique DNA sequence
actggtccgcacgtagaagc

SEQ ID NO: 2336 - DNA, 20 bp, Artificial
  20-mer unique DNA sequence
tcgaaaaatgcgcgccacag

SEQ ID NO: 2337 - DNA, 20 bp, Artificial
  20-mer unique DNA sequence
actgcccgcccctcgtcaac

SEQ ID NO: 2338 - DNA, 20 bp, Artificial
  20-mer unique DNA sequence
taccgccccctagtgcacgc

SEQ ID NO: 2339 - DNA, 20 bp, Artificial
  20-mer unique DNA sequence
tagcggaggcaggcaacagg

SEQ ID NO: 2340 - DNA, 20 bp, Artificial
  20-mer unique DNA sequence
acggcgccaacttcttttcg

SEQ ID NO: 2341 - DNA, 20 bp, Artificial
  20-mer unique DNA sequence
gaaggttaggcagacggcgc

SEQ ID NO: 2342 - DNA, 20 bp, Artificial
  20-mer unique DNA sequence
cgcgcgggatgagctgatat

SEQ ID NO: 2343 - DNA, 20 bp, Artificial
  20-mer unique DNA sequence
gcggggaaaacaggcagcag

SEQ ID NO: 2344 - DNA, 20 bp, Artificial
  20-mer unique DNA sequence
atcagcgggcagcaggtttt

SEQ ID NO: 2345 - DNA, 20 bp, Artificial
  20-mer unique DNA sequence
aacgatcccattagccgcgc

SEQ ID NO: 2346 - DNA, 20 bp, Artificial
  20-mer unique DNA sequence
ccacgatgaagggcgcaatt

SEQ ID NO: 2347 - DNA, 20 bp, Artificial
  20-mer unique DNA sequence
tgtgcgttaagacgctcggc

SEQ ID NO: 2348 - DNA, 20 bp, Artificial
  20-mer unique DNA sequence
catgcgtgtccgacgcagaa

SEQ ID NO: 2349 - DNA, 20 bp, Artificial
  20-mer unique DNA sequence
gtggagcgcttagacagcga

SEQ ID NO: 2350 - DNA, 20 bp, Artificial
  20-mer unique DNA sequence
agctcgcgcctttacgttcc

SEQ ID NO: 2351 - DNA, 20 bp, Artificial
  20-mer unique DNA sequence
tcgggctccagattggcttc

SEQ ID NO: 2352 - DNA, 20 bp, Artificial
  20-mer unique DNA sequence
cggaatgttggacgcccctg

SEQ ID NO: 2353 - DNA, 20 bp, Artificial
  20-mer unique DNA sequence
aggggactggcgcggattta

SEQ ID NO: 2354 - DNA, 20 bp, Artificial
  20-mer unique DNA sequence
tggtgggacgtttgggcgag

SEQ ID NO: 2355 - DNA, 20 bp, Artificial
  20-mer unique DNA sequence
gtaggcccgactgcgaccat

SEQ ID NO: 2356 - DNA, 20 bp, Artificial
  20-mer unique DNA sequence
tgtcactagggcgaggggcg

SEQ ID NO: 2357 - DNA, 20 bp, Artificial
  20-mer unique DNA sequence
gggtgtcggagcggttggag

SEQ ID NO: 2358 - DNA, 20 bp, Artificial
  20-mer unique DNA sequence
tgtgagttggctttccgcgt

SEQ ID NO: 2359 - DNA, 20 bp, Artificial
  20-mer unique DNA sequence
ggccggcagacgctaattca

SEQ ID NO: 2360 - DNA, 20 bp, Artificial
  20-mer unique DNA sequence
ctcaatttcccgatgccggc

SEQ ID NO: 2361 - DNA, 20 bp, Artificial
  20-mer unique DNA sequence
ttggcaggcgctatcggttc

SEQ ID NO: 2362 - DNA, 20 bp, Artificial
  20-mer unique DNA sequence
acccactcccgtccgcctaa

SEQ ID NO: 2363 - DNA, 20 bp, Artificial
  20-mer unique DNA sequence
ctgtttcgccgggacttcgt

SEQ ID NO: 2364 - DNA, 20 bp, Artificial
  20-mer unique DNA sequence
ctgtttgatgcccactcccg

SEQ ID NO: 2365 - DNA, 20 bp, Artificial
  20-mer unique DNA sequence
gtaactacctcggcgcgggg

SEQ ID NO: 2366 - DNA, 20 bp, Artificial
  20-mer unique DNA sequence
cgtcccatcgctcgtccaat

SEQ ID NO: 2367 - DNA, 20 bp, Artificial
  20-mer unique DNA sequence
accccgcccccatctgtaac

SEQ ID NO: 2368 - DNA, 20 bp, Artificial
  20-mer unique DNA sequence
ggaacggttatgggtcgcga

SEQ ID NO: 2369 - DNA, 20 bp, Artificial
  20-mer unique DNA sequence
ggtgcttgcttctgggtcgg

SEQ ID NO: 2370 - DNA, 20 bp, Artificial
  20-mer unique DNA sequence
gaaatgaggcgatgaggcgg

SEQ ID NO: 2371 - DNA, 20 bp, Artificial
  20-mer unique DNA sequence
ctctcgtcctgccgcccaag

SEQ ID NO: 2372 - DNA, 20 bp, Artificial
  20-mer unique DNA sequence
tcacccgccgctcctttaac

SEQ ID NO: 2373 - DNA, 20 bp, Artificial
  20-mer unique DNA sequence
cggcaatcctcgcagacaac

SEQ ID NO: 2374 - DNA, 20 bp, Artificial
  20-mer unique DNA sequence
acacccgtcggcccttcttt

SEQ ID NO: 2375 - DNA, 20 bp, Artificial
  20-mer unique DNA sequence
aatcggtcgcgtgcaaagca

SEQ ID NO: 2376 - DNA, 20 bp, Artificial
  20-mer unique DNA sequence
tctacgcctccgcatcctcg

SEQ ID NO: 2377 - DNA, 20 bp, Artificial
  20-mer unique DNA sequence
atccgcgccagcccaatagt

SEQ ID NO: 2378 - DNA, 20 bp, Artificial
  20-mer unique DNA sequence
ctgcttttccctggccgtgc

SEQ ID NO: 2379 - DNA, 20 bp, Artificial
  20-mer unique DNA sequence
agcgcgtgtggtttcgatca

SEQ ID NO: 2380 - DNA, 20 bp, Artificial
  20-mer unique DNA sequence
tgatgtccgcgcaaaaacgt

SEQ ID NO: 2381 - DNA, 20 bp, Artificial
  20-mer unique DNA sequence
gcagagacgcgccgagacat

SEQ ID NO: 2382 - DNA, 20 bp, Artificial
  20-mer unique DNA sequence
gatgcgccaatccctccgtc

SEQ ID NO: 2383 - DNA, 20 bp, Artificial
  20-mer unique DNA sequence
catcggcgaagaaacacccg

SEQ ID NO: 2384 - DNA, 20 bp, Artificial
  20-mer unique DNA sequence
gacccgccaacgattccctc

SEQ ID NO: 2385 - DNA, 20 bp, Artificial
  20-mer unique DNA sequence
ttgctagcgcccaccccatg

SEQ ID NO: 2386 - DNA, 20 bp, Artificial
  20-mer unique DNA sequence
aagggatcaccctggtgcag

SEQ ID NO: 2387 - DNA, 20 bp, Artificial
  20-mer unique DNA sequence
tcgtctaggcaggacgccaa

SEQ ID NO: 2388 - DNA, 20 bp, Artificial
  20-mer unique DNA sequence
gggggagcgattgattggag

SEQ ID NO: 2389 - DNA, 20 bp, Artificial
  20-mer unique DNA sequence
aggggggcggacaagaaaga

SEQ ID NO: 2390 - DNA, 20 bp, Artificial
  20-mer unique DNA sequence
agcaacagggcgaggacgag

SEQ ID NO: 2391 - DNA, 20 bp, Artificial
  20-mer unique DNA sequence
cgggaacgcaatagggtggc

SEQ ID NO: 2392 - DNA, 20 bp, Artificial
  20-mer unique DNA sequence
cgcccccacgacctgctaac

SEQ ID NO: 2393 - DNA, 20 bp, Artificial
  20-mer unique DNA sequence
tatgagcaacgccccaccct

SEQ ID NO: 2394 - DNA, 20 bp, Artificial
  20-mer unique DNA sequence
cggtctgccgcatcatgtca

SEQ ID NO: 2395 - DNA, 20 bp, Artificial
  20-mer unique DNA sequence
acggctcccccgagtagagg

SEQ ID NO: 2396 - DNA, 20 bp, Artificial
  20-mer unique DNA sequence
actatgggcagcggggtcac

SEQ ID NO: 2397 - DNA, 20 bp, Artificial
  20-mer unique DNA sequence
atagcacgccccatttccga

SEQ ID NO: 2398 - DNA, 20 bp, Artificial
  20-mer unique DNA sequence
gacgagggcattgagcaggc

SEQ ID NO: 2399 - DNA, 20 bp, Artificial
  20-mer unique DNA sequence
taaggtgcggggttgcggtt

SEQ ID NO: 2400 - DNA, 20 bp, Artificial
  20-mer unique DNA sequence
ctggggggaaccttgcaaaa

SEQ ID NO: 2401 - DNA, 20 bp, Artificial
  20-mer unique DNA sequence
cgcacgcatatcagcccaag

SEQ ID NO: 2402 - DNA, 20 bp, Artificial
  20-mer unique DNA sequence
attcccccagaagccagccc

SEQ ID NO: 2403 - DNA, 20 bp, Artificial
  20-mer unique DNA sequence
cgccgaacgaccgacaacac

SEQ ID NO: 2404 - DNA, 20 bp, Artificial
  20-mer unique DNA sequence
cgtgggcatatgagggcgtt

SEQ ID NO: 2405 - DNA, 20 bp, Artificial
  20-mer unique DNA sequence
gcaaacgcggggataatggt

SEQ ID NO: 2406 - DNA, 20 bp, Artificial
  20-mer unique DNA sequence
cccaatgctaaggctcgacg

SEQ ID NO: 2407 - DNA, 20 bp, Artificial
  20-mer unique DNA sequence
tcccctgcaagcccacgata

SEQ ID NO: 2408 - DNA, 20 bp, Artificial
  20-mer unique DNA sequence
cccccgttttagcacttccg

SEQ ID NO: 2409 - DNA, 20 bp, Artificial
  20-mer unique DNA sequence
ttgatcgggtgcggggtagt

SEQ ID NO: 2410 - DNA, 20 bp, Artificial
  20-mer unique DNA sequence
ccatgtccaattccacggcg

SEQ ID NO: 2411 - DNA, 20 bp, Artificial
  20-mer unique DNA sequence
tgattcagcccccttgcagg

SEQ ID NO: 2412 - DNA, 20 bp, Artificial
  20-mer unique DNA sequence
tacccgccccgatgtcctag

SEQ ID NO: 2413 - DNA, 20 bp, Artificial
  20-mer unique DNA sequence
tagggggcggaaacatgatg

SEQ ID NO: 2414 - DNA, 20 bp, Artificial
  20-mer unique DNA sequence
cctttcccccttcgctgggt

SEQ ID NO: 2415 - DNA, 20 bp, Artificial
  20-mer unique DNA sequence
ggcccgcagccataaacaac

SEQ ID NO: 2416 - DNA, 20 bp, Artificial
  20-mer unique DNA sequence
ccgttcccttgtcgcctcgt

SEQ ID NO: 2417 - DNA, 20 bp, Artificial
  20-mer unique DNA sequence
ggaggcagacggggagtaaa

SEQ ID NO: 2418 - DNA, 20 bp, Artificial
  20-mer unique DNA sequence
gctcgcagcgcaagtgatta

SEQ ID NO: 2419 - DNA, 20 bp, Artificial
  20-mer unique DNA sequence
tgtaccccagtgcagccctt

SEQ ID NO: 2420 - DNA, 20 bp, Artificial
  20-mer unique DNA sequence
aactgctttactcgcggccc

SEQ ID NO: 2421 - DNA, 20 bp, Artificial
  20-mer unique DNA sequence
tgcccccattcgacctcttc

SEQ ID NO: 2422 - DNA, 20 bp, Artificial
  20-mer unique DNA sequence
ttcgcgccgtcttcttcaca

SEQ ID NO: 2423 - DNA, 20 bp, Artificial
  20-mer unique DNA sequence
ccgggccaccaaagacgatc

SEQ ID NO: 2424 - DNA, 20 bp, Artificial
  20-mer unique DNA sequence
acaaggccaacccatacggg

SEQ ID NO: 2425 - DNA, 20 bp, Artificial
  20-mer unique DNA sequence
agtacccccccccgatggag

SEQ ID NO: 2426 - DNA, 20 bp, Artificial
  20-mer unique DNA sequence
gcgtgattcgtctgggctgc

SEQ ID NO: 2427 - DNA, 20 bp, Artificial
  20-mer unique DNA sequence
tgtcggcgggggttgagaag

SEQ ID NO: 2428 - DNA, 20 bp, Artificial
  20-mer unique DNA sequence
tggcctgataagaacgcggg

SEQ ID NO: 2429 - DNA, 20 bp, Artificial
  20-mer unique DNA sequence
gagaccggggggaagcgaga

SEQ ID NO: 2430 - DNA, 20 bp, Artificial
  20-mer unique DNA sequence
caaaccgccaaaaaccaccg

SEQ ID NO: 2431 - DNA, 20 bp, Artificial
  20-mer unique DNA sequence
cctaatcccagtgtgccgcg

SEQ ID NO: 2432 - DNA, 20 bp, Artificial
  20-mer unique DNA sequence
gccccgaagctcgacagaaa

SEQ ID NO: 2433 - DNA, 20 bp, Artificial
  20-mer unique DNA sequence
gcccgtttgtcgatgggtgg

SEQ ID NO: 2434 - DNA, 20 bp, Artificial
  20-mer unique DNA sequence
atatggagccgggaaagcga

SEQ ID NO: 2435 - DNA, 20 bp, Artificial
  20-mer unique DNA sequence
ttttgggccgtgcagtagcg

SEQ ID NO: 2436 - DNA, 20 bp, Artificial
  20-mer unique DNA sequence
ttaccgccgaccgcctttag

SEQ ID NO: 2437 - DNA, 20 bp, Artificial
  20-mer unique DNA sequence
tttgagggtgcggagcgatg

SEQ ID NO: 2438 - DNA, 20 bp, Artificial
  20-mer unique DNA sequence
ccccggatccatgtagccct

SEQ ID NO: 2439 - DNA, 20 bp, Artificial
  20-mer unique DNA sequence
ccccttccgcaataacgcac

SEQ ID NO: 2440 - DNA, 20 bp, Artificial
  20-mer unique DNA sequence
tccgcacacgccagcataaa

SEQ ID NO: 2441 - DNA, 20 bp, Artificial
  20-mer unique DNA sequence
cgcgacgaatagccccagag

SEQ ID NO: 2442 - DNA, 20 bp, Artificial
  20-mer unique DNA sequence
gcaaccggggcgatgaatta

SEQ ID NO: 2443 - DNA, 20 bp, Artificial
  20-mer unique DNA sequence
ttggccttcgcgtcttttca

SEQ ID NO: 2444 - DNA, 20 bp, Artificial
  20-mer unique DNA sequence
gttccccagggcttttcgtg

SEQ ID NO: 2445 - DNA, 20 bp, Artificial
  20-mer unique DNA sequence
gagcccaacacagcgggagg

SEQ ID NO: 2446 - DNA, 20 bp, Artificial
  20-mer unique DNA sequence
aattgcactaggcgtcgggc

SEQ ID NO: 2447 - DNA, 20 bp, Artificial
  20-mer unique DNA sequence
ggccgccaccaccttaatgt

SEQ ID NO: 2448 - DNA, 20 bp, Artificial
  20-mer unique DNA sequence
atgccagccctccccgtaga

SEQ ID NO: 2449 - DNA, 20 bp, Artificial
  20-mer unique DNA sequence
caccctcctcgcacacgaaa

SEQ ID NO: 2450 - DNA, 20 bp, Artificial
  20-mer unique DNA sequence
ggcggcgttgatccagtgaa

SEQ ID NO: 2451 - DNA, 20 bp, Artificial
  20-mer unique DNA sequence
acccagaaagccgccgaaag

SEQ ID NO: 2452 - DNA, 20 bp, Artificial
  20-mer unique DNA sequence
ctccgctgctttccgcattg

SEQ ID NO: 2453 - DNA, 20 bp, Artificial
  20-mer unique DNA sequence
gagaggaggcggacgaaacg

SEQ ID NO: 2454 - DNA, 20 bp, Artificial
  20-mer unique DNA sequence
catacctggccgcgaacaca

SEQ ID NO: 2455 - DNA, 20 bp, Artificial
  20-mer unique DNA sequence
gttgcccatcgctccctcac

SEQ ID NO: 2456 - DNA, 20 bp, Artificial
  20-mer unique DNA sequence
tgcctgccgccgttatctcg

SEQ ID NO: 2457 - DNA, 20 bp, Artificial
  20-mer unique DNA sequence
tcccggacgtcagtctgttg

SEQ ID NO: 2458 - DNA, 20 bp, Artificial
  20-mer unique DNA sequence
tcgatagcggtcaggggcag

SEQ ID NO: 2459 - DNA, 20 bp, Artificial
  20-mer unique DNA sequence
acccaacccgtcccaagatg

SEQ ID NO: 2460 - DNA, 20 bp, Artificial
  20-mer unique DNA sequence
aatttccaccggcccaagct

SEQ ID NO: 2461 - DNA, 20 bp, Artificial
  20-mer unique DNA sequence
atgaacggcgtgaatgtccg

SEQ ID NO: 2462 - DNA, 20 bp, Artificial
  20-mer unique DNA sequence
ggcaaggggctgaaaaaggc

SEQ ID NO: 2463 - DNA, 20 bp, Artificial
  20-mer unique DNA sequence
atgaagcaagcacacccccc

SEQ ID NO: 2464 - DNA, 20 bp, Artificial
  20-mer unique DNA sequence
tccgggccgctgcctaaaac

SEQ ID NO: 2465 - DNA, 20 bp, Artificial
  20-mer unique DNA sequence
ccaatccccacccgtaaggc

SEQ ID NO: 2466 - DNA, 20 bp, Artificial
  20-mer unique DNA sequence
agcggcggtcacaattcaag

SEQ ID NO: 2467 - DNA, 20 bp, Artificial
  20-mer unique DNA sequence
cgcggggctgttgtatctcc

SEQ ID NO: 2468 - DNA, 20 bp, Artificial
  20-mer unique DNA sequence
tttcccgttcctatgccgtc

SEQ ID NO: 2469 - DNA, 20 bp, Artificial
  20-mer unique DNA sequence
tgaccaccatccacccgacg

SEQ ID NO: 2470 - DNA, 20 bp, Artificial
  20-mer unique DNA sequence
catcccgcacccccgtaaac

SEQ ID NO: 2471 - DNA, 20 bp, Artificial
  20-mer unique DNA sequence
ccacaaagactcgcggggac

SEQ ID NO: 2472 - DNA, 20 bp, Artificial
  20-mer unique DNA sequence
tcccaccggagtgaaccctt

SEQ ID NO: 2473 - DNA, 20 bp, Artificial
  20-mer unique DNA sequence
tacagccgcgtcgctaccat

SEQ ID NO: 2474 - DNA, 20 bp, Artificial
  20-mer unique DNA sequence
aggacctacggtcactggct

SEQ ID NO: 2475 - DNA, 20 bp, Artificial
  20-mer unique DNA sequence
tgaaggccactcctggggta

SEQ ID NO: 2476 - DNA, 20 bp, Artificial
  20-mer unique DNA sequence
cgtgggtctgttgaaggctg

SEQ ID NO: 2477 - DNA, 20 bp, Artificial
  20-mer unique DNA sequence
ccctcccaatcccagacgag

SEQ ID NO: 2478 - DNA, 20 bp, Artificial
  20-mer unique DNA sequence
ttccgccgccctgtctatcg

SEQ ID NO: 2479 - DNA, 20 bp, Artificial
  20-mer unique DNA sequence
aacggcgaagacaaccaccc

SEQ ID NO: 2480 - DNA, 20 bp, Artificial
  20-mer unique DNA sequence
gcccgcgctttcgacattta

SEQ ID NO: 2481 - DNA, 20 bp, Artificial
  20-mer unique DNA sequence
gcccgaagtaccgaaatagg

SEQ ID NO: 2482 - DNA, 20 bp, Artificial
  20-mer unique DNA sequence
cggtgtcagccacgacatca

SEQ ID NO: 2483 - DNA, 20 bp, Artificial
  20-mer unique DNA sequence
gacgctgcgatccacgtgtt

SEQ ID NO: 2484 - DNA, 20 bp, Artificial
  20-mer unique DNA sequence
cccccggcgtctaccttctc

SEQ ID NO: 2485 - DNA, 20 bp, Artificial
  20-mer unique DNA sequence
accgagccctgtgcacctca

SEQ ID NO: 2486 - DNA, 20 bp, Artificial
  20-mer unique DNA sequence
acaagcatcaggcgaccccc

SEQ ID NO: 2487 - DNA, 20 bp, Artificial
  20-mer unique DNA sequence
cgtgtcggcttggtttcact

SEQ ID NO: 2488 - DNA, 20 bp, Artificial
  20-mer unique DNA sequence
actttccccccgtgactgca

SEQ ID NO: 2489 - DNA, 20 bp, Artificial
  20-mer unique DNA sequence
agcccctgcactactccccc

SEQ ID NO: 2490 - DNA, 20 bp, Artificial
  20-mer unique DNA sequence
gggggtccaatagcgtgtgg

SEQ ID NO: 2491 - DNA, 20 bp, Artificial
  20-mer unique DNA sequence
accatccctgccgtcagcct

SEQ ID NO: 2492 - DNA, 20 bp, Artificial
  20-mer unique DNA sequence
tcccgacatcgcatcgcaaa

SEQ ID NO: 2493 - DNA, 20 bp, Artificial
  20-mer unique DNA sequence
accctacgccatgagccgcc

SEQ ID NO: 2494 - DNA, 20 bp, Artificial
  20-mer unique DNA sequence
ggacgacgaccccccaatgg

SEQ ID NO: 2495 - DNA, 20 bp, Artificial
  20-mer unique DNA sequence
gtcgcggcagcttctatgca

SEQ ID NO: 2496 - DNA, 20 bp, Artificial
  20-mer unique DNA sequence
ctagaaggcatcgcgcgcct

SEQ ID NO: 2497 - DNA, 20 bp, Artificial
  20-mer unique DNA sequence
tacgcccgcccttcacatcc

SEQ ID NO: 2498 - DNA, 20 bp, Artificial
  20-mer unique DNA sequence
aagacccgctgcccctcagt

SEQ ID NO: 2499 - DNA, 20 bp, Artificial
  20-mer unique DNA sequence
cccaagttcctcaccgctcg

SEQ ID NO: 2500 - DNA, 20 bp, Artificial
  20-mer unique DNA sequence
ccggaccacctcgcacaatt

SEQ ID NO: 2501 - DNA, 20 bp, Artificial
  20-mer unique DNA sequence
aagtcccggtctcgtcgcct

SEQ ID NO: 2502 - DNA, 20 bp, Artificial
  20-mer unique DNA sequence
atgacgtcggaggggcggag

SEQ ID NO: 2503 - DNA, 20 bp, Artificial
  20-mer unique DNA sequence
ctggcaacgaaacgacgctc

SEQ ID NO: 2504 - DNA, 20 bp, Artificial
  20-mer unique DNA sequence
gctgagatttgccggggagg

SEQ ID NO: 2505 - DNA, 20 bp, Artificial
  20-mer unique DNA sequence
gtaccgcggctgttgctgca

SEQ ID NO: 2506 - DNA, 20 bp, Artificial
  20-mer unique DNA sequence
tcgggaggcgaggtcagatt

SEQ ID NO: 2507 - DNA, 20 bp, Artificial
  20-mer unique DNA sequence
ggggcaactggggaacgagc

SEQ ID NO: 2508 - DNA, 20 bp, Artificial
  20-mer unique DNA sequence
caggtgaggtgaatcggccg

SEQ ID NO: 2509 - DNA, 20 bp, Artificial
  20-mer unique DNA sequence
taggaggacgaagccgggcg

SEQ ID NO: 2510 - DNA, 20 bp, Artificial
  20-mer unique DNA sequence
ttatcggcgccaattcccag

SEQ ID NO: 2511 - DNA, 20 bp, Artificial
  20-mer unique DNA sequence
cgagccgccacttgcatgag

SEQ ID NO: 2512 - DNA, 20 bp, Artificial
  20-mer unique DNA sequence
tgctcctccccccaaacaac

SEQ ID NO: 2513 - DNA, 20 bp, Artificial
  20-mer unique DNA sequence
atgggtggggtgaatccgga

SEQ ID NO: 2514 - DNA, 20 bp, Artificial
  20-mer unique DNA sequence
aaacaccccaggccacgcag

SEQ ID NO: 2515 - DNA, 20 bp, Artificial
  20-mer unique DNA sequence
aaactagcgaggcggcgaaa

SEQ ID NO: 2516 - DNA, 20 bp, Artificial
  20-mer unique DNA sequence
catggggagcgttttggggg

SEQ ID NO: 2517 - DNA, 20 bp, Artificial
  20-mer unique DNA sequence
cttctagctggcgctccgtt

SEQ ID NO: 2518 - DNA, 20 bp, Artificial
  20-mer unique DNA sequence
caccccgcgctcctttccta

SEQ ID NO: 2519 - DNA, 20 bp, Artificial
  20-mer unique DNA sequence
gcctcatgaatcccccccag

SEQ ID NO: 2520 - DNA, 20 bp, Artificial
  20-mer unique DNA sequence
tggcggtgggggggatacta

SEQ ID NO: 2521 - DNA, 20 bp, Artificial
  20-mer unique DNA sequence
aagtgggctaatgcgggggc

SEQ ID NO: 2522 - DNA, 20 bp, Artificial
  20-mer unique DNA sequence
tcatcggaatcaacgctcgc

SEQ ID NO: 2523 - DNA, 20 bp, Artificial
  20-mer unique DNA sequence
cgacttatgcgcgcgggagt

SEQ ID NO: 2524 - DNA, 20 bp, Artificial
  20-mer unique DNA sequence
ccacgcgcctaccttcccag

SEQ ID NO: 2525 - DNA, 20 bp, Artificial
  20-mer unique DNA sequence
gctgcggccatctcaacctg

SEQ ID NO: 2526 - DNA, 20 bp, Artificial
  20-mer unique DNA sequence
gcacgcctagcagacgcacc

SEQ ID NO: 2527 - DNA, 20 bp, Artificial
  20-mer unique DNA sequence
ggcccagtagttccagcgca

SEQ ID NO: 2528 - DNA, 20 bp, Artificial
  20-mer unique DNA sequence
gcgaggtggatgccggttga

SEQ ID NO: 2529 - DNA, 20 bp, Artificial
  20-mer unique DNA sequence
cattggcctcgatcgcgtta

SEQ ID NO: 2530 - DNA, 20 bp, Artificial
  20-mer unique DNA sequence
agttaggggggcggactcat

SEQ ID NO: 2531 - DNA, 20 bp, Artificial
  20-mer unique DNA sequence
cgcctgaccccctaaaccga

SEQ ID NO: 2532 - DNA, 20 bp, Artificial
  20-mer unique DNA sequence
cgcgtgaggtagtccggtta

SEQ ID NO: 2533 - DNA, 20 bp, Artificial
  20-mer unique DNA sequence
atctcacgcgcaagcctgat

SEQ ID NO: 2534 - DNA, 20 bp, Artificial
  20-mer unique DNA sequence
tgcagctgaggatgggacgt

SEQ ID NO: 2535 - DNA, 20 bp, Artificial
  20-mer unique DNA sequence
gctgggaattgggcacgtgg

SEQ ID NO: 2536 - DNA, 20 bp, Artificial
  20-mer unique DNA sequence
agaggagggcaaggatgggc

SEQ ID NO: 2537 - DNA, 20 bp, Artificial
  20-mer unique DNA sequence
tctgcgggatgtagggagcc

SEQ ID NO: 2538 - DNA, 20 bp, Artificial
  20-mer unique DNA sequence
ttgctcctccggcgtcttgg

SEQ ID NO: 2539 - DNA, 20 bp, Artificial
  20-mer unique DNA sequence
ggagatttggcgagggcgta

SEQ ID NO: 2540 - DNA, 20 bp, Artificial
  20-mer unique DNA sequence
cggcccgaactgtagcgaca

SEQ ID NO: 2541 - DNA, 20 bp, Artificial
  20-mer unique DNA sequence
cctcatgaagcggggatgcc

SEQ ID NO: 2542 - DNA, 20 bp, Artificial
  20-mer unique DNA sequence
ccgggcccacttgatggatt

SEQ ID NO: 2543 - DNA, 20 bp, Artificial
  20-mer unique DNA sequence
gacgccaccaccttcgcgac

SEQ ID NO: 2544 - DNA, 20 bp, Artificial
  20-mer unique DNA sequence
atcgcctctcccacgctcat

SEQ ID NO: 2545 - DNA, 20 bp, Artificial
  20-mer unique DNA sequence
cccccccgcctatatcgtct

SEQ ID NO: 2546 - DNA, 20 bp, Artificial
  20-mer unique DNA sequence
tccacctcagcgcaaaagcc

SEQ ID NO: 2547 - DNA, 20 bp, Artificial
  20-mer unique DNA sequence
ccgtcggcgtagccccatat

SEQ ID NO: 2548 - DNA, 20 bp, Artificial
  20-mer unique DNA sequence
cggcccggactgttggagtg

SEQ ID NO: 2549 - DNA, 20 bp, Artificial
  20-mer unique DNA sequence
tgggtgggtcggttctaggc

SEQ ID NO: 2550 - DNA, 20 bp, Artificial
  20-mer unique DNA sequence
cgcttcgccctattccgtca

SEQ ID NO: 2551 - DNA, 20 bp, Artificial
  20-mer unique DNA sequence
tggatgttgtggtcgggggt

SEQ ID NO: 2552 - DNA, 20 bp, Artificial
  20-mer unique DNA sequence
gcgcctgttgggtttgtcgg

SEQ ID NO: 2553 - DNA, 20 bp, Artificial
  20-mer unique DNA sequence
gtcgcgcggatattcgtttg

SEQ ID NO: 2554 - DNA, 20 bp, Artificial
  20-mer unique DNA sequence
taggacacgctggggggaat

SEQ ID NO: 2555 - DNA, 20 bp, Artificial
  20-mer unique DNA sequence
ggccgctttgcacctttccc

SEQ ID NO: 2556 - DNA, 20 bp, Artificial
  20-mer unique DNA sequence
gccaacaccagaaccacggg

SEQ ID NO: 2557 - DNA, 20 bp, Artificial
  20-mer unique DNA sequence
cacggccttcccttgtcacc

SEQ ID NO: 2558 - DNA, 20 bp, Artificial
  20-mer unique DNA sequence
tggctaccgcttgaccccat

SEQ ID NO: 2559 - DNA, 20 bp, Artificial
  20-mer unique DNA sequence
gattgacacccttggcgccc

SEQ ID NO: 2560 - DNA, 20 bp, Artificial
  20-mer unique DNA sequence
acagacggagttggcgccga

SEQ ID NO: 2561 - DNA, 20 bp, Artificial
  20-mer unique DNA sequence
tgggaaggtgaaaacccgcg

SEQ ID NO: 2562 - DNA, 20 bp, Artificial
  20-mer unique DNA sequence
ccgttaacatcccgcacgca

SEQ ID NO: 2563 - DNA, 20 bp, Artificial
  20-mer unique DNA sequence
cgtctcagtccgcgcatcaa

SEQ ID NO: 2564 - DNA, 20 bp, Artificial
  20-mer unique DNA sequence
gtgggcggcttatgggacag

SEQ ID NO: 2565 - DNA, 20 bp, Artificial
  20-mer unique DNA sequence
tgttctaagctcgcgcctgc

SEQ ID NO: 2566 - DNA, 20 bp, Artificial
  20-mer unique DNA sequence
gatcgcaccccaaccggtaa

SEQ ID NO: 2567 - DNA, 20 bp, Artificial
  20-mer unique DNA sequence
gtttttgcctccacggacct

SEQ ID NO: 2568 - DNA, 20 bp, Artificial
  20-mer unique DNA sequence
gaccgttcgctggggagtga

SEQ ID NO: 2569 - DNA, 20 bp, Artificial
  20-mer unique DNA sequence
aaaccgcgggcaacgtacaa

SEQ ID NO: 2570 - DNA, 20 bp, Artificial
  20-mer unique DNA sequence
cggccccgtgtttactcgtt

SEQ ID NO: 2571 - DNA, 20 bp, Artificial
  20-mer unique DNA sequence
cacgccccgttaccgtcata

SEQ ID NO: 2572 - DNA, 20 bp, Artificial
  20-mer unique DNA sequence
tctccgctcgctgtcattcg

SEQ ID NO: 2573 - DNA, 20 bp, Artificial
  20-mer unique DNA sequence
caggggtcgtgcacttgggc

SEQ ID NO: 2574 - DNA, 20 bp, Artificial
  20-mer unique DNA sequence
aaagaacccgcgccaaaccg

SEQ ID NO: 2575 - DNA, 20 bp, Artificial
  20-mer unique DNA sequence
cgtgtgtgggggggtgttct

SEQ ID NO: 2576 - DNA, 20 bp, Artificial
  20-mer unique DNA sequence
cgtagcacggccaatggaaa

SEQ ID NO: 2577 - DNA, 20 bp, Artificial
  20-mer unique DNA sequence
taccctgccctaacggtccg

SEQ ID NO: 2578 - DNA, 20 bp, Artificial
  20-mer unique DNA sequence
tccatctaaccccgccatcg

SEQ ID NO: 2579 - DNA, 20 bp, Artificial
  20-mer unique DNA sequence
tttgctgggttagggggctg

SEQ ID NO: 2580 - DNA, 20 bp, Artificial
  20-mer unique DNA sequence
gcccgccttgctgaatgtct

SEQ ID NO: 2581 - DNA, 20 bp, Artificial
  20-mer unique DNA sequence
cgaaacgcaacggaggtcaa

SEQ ID NO: 2582 - DNA, 20 bp, Artificial
  20-mer unique DNA sequence
gcaggctgatgacccccaga

SEQ ID NO: 2583 - DNA, 20 bp, Artificial
  20-mer unique DNA sequence
ccaggtagcgcggggggtaa

SEQ ID NO: 2584 - DNA, 20 bp, Artificial
  20-mer unique DNA sequence
gctgcaggtccacttcacag

SEQ ID NO: 2585 - DNA, 20 bp, Artificial
  20-mer unique DNA sequence
cgtgtggtgcttgcgttccg

SEQ ID NO: 2586 - DNA, 20 bp, Artificial
  20-mer unique DNA sequence
agggcggcctgaactggttt

SEQ ID NO: 2587 - DNA, 20 bp, Artificial
  20-mer unique DNA sequence
tgccaggctaggcccctaat

SEQ ID NO: 2588 - DNA, 20 bp, Artificial
  20-mer unique DNA sequence
cacggccggtagatgcacaa

SEQ ID NO: 2589 - DNA, 20 bp, Artificial
  20-mer unique DNA sequence
atttccgggggtatctcgcg

SEQ ID NO: 2590 - DNA, 20 bp, Artificial
  20-mer unique DNA sequence
acccccgatgtcccctacaa

SEQ ID NO: 2591 - DNA, 20 bp, Artificial
  20-mer unique DNA sequence
atggcgattggggagagacg

SEQ ID NO: 2592 - DNA, 20 bp, Artificial
  20-mer unique DNA sequence
cgggtgcgtgagcctgataa

SEQ ID NO: 2593 - DNA, 20 bp, Artificial
  20-mer unique DNA sequence
cctcgttcccacgtcttccg

SEQ ID NO: 2594 - DNA, 20 bp, Artificial
  20-mer unique DNA sequence
tgtctcttaggcgacctgcg

SEQ ID NO: 2595 - DNA, 20 bp, Artificial
  20-mer unique DNA sequence
tacacgtatgactggccggg

SEQ ID NO: 2596 - DNA, 20 bp, Artificial
  20-mer unique DNA sequence
tccacttcgcacccgctttg

SEQ ID NO: 2597 - DNA, 20 bp, Artificial
  20-mer unique DNA sequence
gggggggtggccatatatcg

SEQ ID NO: 2598 - DNA, 20 bp, Artificial
  20-mer unique DNA sequence
ggtcgtcgagttgggggctg

SEQ ID NO: 2599 - DNA, 20 bp, Artificial
  20-mer unique DNA sequence
ccggcttgcttttgggagct

SEQ ID NO: 2600 - DNA, 20 bp, Artificial
  20-mer unique DNA sequence
aggtcggagcaaggcaggtg

SEQ ID NO: 2601 - DNA, 20 bp, Artificial
  20-mer unique DNA sequence
gcaggcgcgttgggcttatc

SEQ ID NO: 2602 - DNA, 20 bp, Artificial
  20-mer unique DNA sequence
agtaggactcgggggcggtg

SEQ ID NO: 2603 - DNA, 20 bp, Artificial
  20-mer unique DNA sequence
tttgggggagggttgaatgg

SEQ ID NO: 2604 - DNA, 20 bp, Artificial
  20-mer unique DNA sequence
ttgggctaccttggcatcgg

SEQ ID NO: 2605 - DNA, 20 bp, Artificial
  20-mer unique DNA sequence
tttgcggaggggggagacag

SEQ ID NO: 2606 - DNA, 20 bp, Artificial
  20-mer unique DNA sequence
gcagccttcggctagctcat

SEQ ID NO: 2607 - DNA, 20 bp, Artificial
  20-mer unique DNA sequence
aaaggcgattcgctggcaca

SEQ ID NO: 2608 - DNA, 20 bp, Artificial
  20-mer unique DNA sequence
gacattttggcgggcggaga

SEQ ID NO: 2609 - DNA, 20 bp, Artificial
  20-mer unique DNA sequence
gcggatgggggtgttgggac

SEQ ID NO: 2610 - DNA, 20 bp, Artificial
  20-mer unique DNA sequence
aggatgtgggggctacgggt

SEQ ID NO: 2611 - DNA, 20 bp, Artificial
  20-mer unique DNA sequence
aaggtgggcaggggcaaatc

SEQ ID NO: 2612 - DNA, 20 bp, Artificial
  20-mer unique DNA sequence
tcccgccaccgtctgtttgc

SEQ ID NO: 2613 - DNA, 20 bp, Artificial
  20-mer unique DNA sequence
agctagcgtcagcgactgag

SEQ ID NO: 2614 - DNA, 20 bp, Artificial
  20-mer unique DNA sequence
agtctcggttcgcgtgccca

SEQ ID NO: 2615 - DNA, 20 bp, Artificial
  20-mer unique DNA sequence
aagcctaggtccccccgcac

SEQ ID NO: 2616 - DNA, 20 bp, Artificial
  20-mer unique DNA sequence
ccggtccacgatcttcactc

SEQ ID NO: 2617 - DNA, 20 bp, Artificial
  20-mer unique DNA sequence
tataaggcgccaatccccga

SEQ ID NO: 2618 - DNA, 20 bp, Artificial
  20-mer unique DNA sequence
ccgttcgtttattcgcccgt

SEQ ID NO: 2619 - DNA, 20 bp, Artificial
  20-mer unique DNA sequence
agcgaggggaacaggcgagg

SEQ ID NO: 2620 - DNA, 20 bp, Artificial
  20-mer unique DNA sequence
atcccacccgccatgaagac

SEQ ID NO: 2621 - DNA, 20 bp, Artificial
  20-mer unique DNA sequence
gcgttctccggcacatgttg

SEQ ID NO: 2622 - DNA, 20 bp, Artificial
  20-mer unique DNA sequence
tgcatatctcgatcgcggca

SEQ ID NO: 2623 - DNA, 20 bp, Artificial
  20-mer unique DNA sequence
acgaatccgcacgaacccct

SEQ ID NO: 2624 - DNA, 20 bp, Artificial
  20-mer unique DNA sequence
cccgttgttcgtctcccctg

SEQ ID NO: 2625 - DNA, 20 bp, Artificial
  20-mer unique DNA sequence
tgtttaggcgatgggcggtg

SEQ ID NO: 2626 - DNA, 20 bp, Artificial
  20-mer unique DNA sequence
ctctcaataagggcgccgga

SEQ ID NO: 2627 - DNA, 20 bp, Artificial
  20-mer unique DNA sequence
gcaccgatcgcctaggaacc

SEQ ID NO: 2628 - DNA, 20 bp, Artificial
  20-mer unique DNA sequence
gccagccaacgaccaatccg

SEQ ID NO: 2629 - DNA, 20 bp, Artificial
  20-mer unique DNA sequence
gggctttggtatcgctgggg

SEQ ID NO: 2630 - DNA, 20 bp, Artificial
  20-mer unique DNA sequence
tagcgctgccggacgtagta

SEQ ID NO: 2631 - DNA, 20 bp, Artificial
  20-mer unique DNA sequence
tcacgggctagtccttccca

SEQ ID NO: 2632 - DNA, 20 bp, Artificial
  20-mer unique DNA sequence
ggtctaagcggcgtcccaca

SEQ ID NO: 2633 - DNA, 20 bp, Artificial
  20-mer unique DNA sequence
ccgtcgtgggcgtgataggg

SEQ ID NO: 2634 - DNA, 20 bp, Artificial
  20-mer unique DNA sequence
taggctgatttggcgggcat

SEQ ID NO: 2635 - DNA, 20 bp, Artificial
  20-mer unique DNA sequence
ctgggaggagtgcgaagggg

SEQ ID NO: 2636 - DNA, 20 bp, Artificial
  20-mer unique DNA sequence
tgtcattcgggcaggtcggc

SEQ ID NO: 2637 - DNA, 20 bp, Artificial
  20-mer unique DNA sequence
ggttgcgggtctgttggaag

SEQ ID NO: 2638 - DNA, 20 bp, Artificial
  20-mer unique DNA sequence
gagcgcgcgacgaagatcta

SEQ ID NO: 2639 - DNA, 20 bp, Artificial
  20-mer unique DNA sequence
actgcaacggctggtgggct

SEQ ID NO: 2640 - DNA, 20 bp, Artificial
  20-mer unique DNA sequence
cggccgcatcctctttgagt

SEQ ID NO: 2641 - DNA, 20 bp, Artificial
  20-mer unique DNA sequence
cggcttccctcccgttgact

SEQ ID NO: 2642 - DNA, 20 bp, Artificial
  20-mer unique DNA sequence
ggcggtaacaagcgggtcag

SEQ ID NO: 2643 - DNA, 20 bp, Artificial
  20-mer unique DNA sequence
cgctggccgggtgactttaa

SEQ ID NO: 2644 - DNA, 20 bp, Artificial
  20-mer unique DNA sequence
ccccctcggccactctaacg

SEQ ID NO: 2645 - DNA, 20 bp, Artificial
  20-mer unique DNA sequence
ctgtaggcgggaagcgggtc

SEQ ID NO: 2646 - DNA, 20 bp, Artificial
  20-mer unique DNA sequence
cgggcgcacattctgagctg

SEQ ID NO: 2647 - DNA, 20 bp, Artificial
  20-mer unique DNA sequence
ccgaatggagacaggccacc

SEQ ID NO: 2648 - DNA, 20 bp, Artificial
  20-mer unique DNA sequence
cctgcgccaccttgacacga

SEQ ID NO: 2649 - DNA, 20 bp, Artificial
  20-mer unique DNA sequence
cagttccgggcgcacaaacc

SEQ ID NO: 2650 - DNA, 20 bp, Artificial
  20-mer unique DNA sequence
acacaccctcgcatgccaaa

SEQ ID NO: 2651 - DNA, 20 bp, Artificial
  20-mer unique DNA sequence
gggggacggtgtggggagag

SEQ ID NO: 2652 - DNA, 20 bp, Artificial
  20-mer unique DNA sequence
cgcggggatggctggaataa

SEQ ID NO: 2653 - DNA, 20 bp, Artificial
  20-mer unique DNA sequence
tttggggaaggtcgtgggcc

SEQ ID NO: 2654 - DNA, 20 bp, Artificial
  20-mer unique DNA sequence
ccaggcctcttcaacccgcc

SEQ ID NO: 2655 - DNA, 20 bp, Artificial
  20-mer unique DNA sequence
gtgcctttgcgggtgttgct

SEQ ID NO: 2656 - DNA, 20 bp, Artificial
  20-mer unique DNA sequence
tgtttgggcctcatggcagc

SEQ ID NO: 2657 - DNA, 20 bp, Artificial
  20-mer unique DNA sequence
ccatcaccgctttgagccaa

SEQ ID NO: 2658 - DNA, 20 bp, Artificial
  20-mer unique DNA sequence
cgccaacataagctccccgc

SEQ ID NO: 2659 - DNA, 20 bp, Artificial
  20-mer unique DNA sequence
atcgcggtggggcaagtcag

SEQ ID NO: 2660 - DNA, 20 bp, Artificial
  20-mer unique DNA sequence
aaacccagacgccaaagcca

SEQ ID NO: 2661 - DNA, 20 bp, Artificial
  20-mer unique DNA sequence
catcatccacccccacggct

SEQ ID NO: 2662 - DNA, 20 bp, Artificial
  20-mer unique DNA sequence
gactggggaacctcgggacg

SEQ ID NO: 2663 - DNA, 20 bp, Artificial
  20-mer unique DNA sequence
attgcccctcccacacgaag

SEQ ID NO: 2664 - DNA, 20 bp, Artificial
  20-mer unique DNA sequence
gtgggcatttttcgcttggc

SEQ ID NO: 2665 - DNA, 20 bp, Artificial
  20-mer unique DNA sequence
tgcttgcccgagaccctgtc

SEQ ID NO: 2666 - DNA, 20 bp, Artificial
  20-mer unique DNA sequence
cccgcccaaagtctgccctc

SEQ ID NO: 2667 - DNA, 20 bp, Artificial
  20-mer unique DNA sequence
cgatgcgccacaccctaccc

SEQ ID NO: 2668 - DNA, 20 bp, Artificial
  20-mer unique DNA sequence
agctttttgatcgcgcggag

SEQ ID NO: 2669 - DNA, 20 bp, Artificial
  20-mer unique DNA sequence
ggcgccggctgtcttcttgt

SEQ ID NO: 2670 - DNA, 20 bp, Artificial
  20-mer unique DNA sequence
gtgtacatgtctgcggcggg

SEQ ID NO: 2671 - DNA, 20 bp, Artificial
  20-mer unique DNA sequence
gtgtgtgatggaggcccgtg

SEQ ID NO: 2672 - DNA, 20 bp, Artificial
  20-mer unique DNA sequence
tcagaaaccagatcggggcg

SEQ ID NO: 2673 - DNA, 20 bp, Artificial
  20-mer unique DNA sequence
ttgataattgcccgtgcccc

SEQ ID NO: 2674 - DNA, 20 bp, Artificial
  20-mer unique DNA sequence
gcttctagatcggggcgcac

SEQ ID NO: 2675 - DNA, 20 bp, Artificial
  20-mer unique DNA sequence
cccaaacatacccgtgcgcg

SEQ ID NO: 2676 - DNA, 20 bp, Artificial
  20-mer unique DNA sequence
ccacttgaatcccggcaccg

SEQ ID NO: 2677 - DNA, 20 bp, Artificial
  20-mer unique DNA sequence
cgcgaaccccaccaaagcct

SEQ ID NO: 2678 - DNA, 20 bp, Artificial
  20-mer unique DNA sequence
ccctccgcttcgccctgtag

SEQ ID NO: 2679 - DNA, 20 bp, Artificial
  20-mer unique DNA sequence
ggatgaggggaccgggagct

SEQ ID NO: 2680 - DNA, 20 bp, Artificial
  20-mer unique DNA sequence
tcggggggtaggcggacagt

SEQ ID NO: 2681 - DNA, 20 bp, Artificial
  20-mer unique DNA sequence
catgttggggcgcgatttga

SEQ ID NO: 2682 - DNA, 20 bp, Artificial
  20-mer unique DNA sequence
cgctctgatcagtgagccct

SEQ ID NO: 2683 - DNA, 20 bp, Artificial
  20-mer unique DNA sequence
ccgtgttgcagtgccggata

SEQ ID NO: 2684 - DNA, 20 bp, Artificial
  20-mer unique DNA sequence
acatttttgggggtggttcg

SEQ ID NO: 2685 - DNA, 20 bp, Artificial
  20-mer unique DNA sequence
cgagaaggccaacaggggga

SEQ ID NO: 2686 - DNA, 20 bp, Artificial
  20-mer unique DNA sequence
tccccgaacggtaatccgca

SEQ ID NO: 2687 - DNA, 20 bp, Artificial
  20-mer unique DNA sequence
ttattgcgggcggcggttat

SEQ ID NO: 2688 - DNA, 20 bp, Artificial
  20-mer unique DNA sequence
acagagcgtggccgaggtgg

SEQ ID NO: 2689 - DNA, 20 bp, Artificial
  20-mer unique DNA sequence
acccccgaccaacgcacaca

SEQ ID NO: 2690 - DNA, 20 bp, Artificial
  20-mer unique DNA sequence
gatgagtgcggtgaacgggg

SEQ ID NO: 2691 - DNA, 20 bp, Artificial
  20-mer unique DNA sequence
ccactcgcgttccctttcgt

SEQ ID NO: 2692 - DNA, 20 bp, Artificial
  20-mer unique DNA sequence
atcacaccgtgcgtatcccg

SEQ ID NO: 2693 - DNA, 20 bp, Artificial
  20-mer unique DNA sequence
acgagcgcctagtgaggcaa

SEQ ID NO: 2694 - DNA, 20 bp, Artificial
  20-mer unique DNA sequence
ctacggaggaggggatgcga

SEQ ID NO: 2695 - DNA, 20 bp, Artificial
  20-mer unique DNA sequence
gccccgtgacagcccaattt

SEQ ID NO: 2696 - DNA, 20 bp, Artificial
  20-mer unique DNA sequence
ctttgggagatgctgcgcgg

SEQ ID NO: 2697 - DNA, 20 bp, Artificial
  20-mer unique DNA sequence
cagtaacggcctcatgccca

SEQ ID NO: 2698 - DNA, 20 bp, Artificial
  20-mer unique DNA sequence
ccgcgccgagtagaggagaa

SEQ ID NO: 2699 - DNA, 20 bp, Artificial
  20-mer unique DNA sequence
tggaagagagcgggatgggc

SEQ ID NO: 2700 - DNA, 20 bp, Artificial
  20-mer unique DNA sequence
gcggtcggaggggtggaaat

SEQ ID NO: 2701 - DNA, 20 bp, Artificial
  20-mer unique DNA sequence
acctcctcccccctcggtaa

SEQ ID NO: 2702 - DNA, 20 bp, Artificial
  20-mer unique DNA sequence
ccaaattcgctagcacgccg

SEQ ID NO: 2703 - DNA, 20 bp, Artificial
  20-mer unique DNA sequence
acgggtcatgttgggggtgt

SEQ ID NO: 2704 - DNA, 20 bp, Artificial
  20-mer unique DNA sequence
ccaaattcgctgcttcccag

SEQ ID NO: 2705 - DNA, 20 bp, Artificial
  20-mer unique DNA sequence
tagctgcgtggggggattca

SEQ ID NO: 2706 - DNA, 20 bp, Artificial
  20-mer unique DNA sequence
aagtctcgtcgacacgtccc

SEQ ID NO: 2707 - DNA, 20 bp, Artificial
  20-mer unique DNA sequence
cacttactggggacccgctt

SEQ ID NO: 2708 - DNA, 20 bp, Artificial
  20-mer unique DNA sequence
cggcagcacccttgcccgag

SEQ ID NO: 2709 - DNA, 20 bp, Artificial
  20-mer unique DNA sequence
tgaatgggggggaaacagcg

SEQ ID NO: 2710 - DNA, 20 bp, Artificial
  20-mer unique DNA sequence
ggaaggttggcttgagggat

SEQ ID NO: 2711 - DNA, 20 bp, Artificial
  20-mer unique DNA sequence
ccacccactcctgctccgct

SEQ ID NO: 2712 - DNA, 20 bp, Artificial
  20-mer unique DNA sequence
ccgggcaatttctccctgat

SEQ ID NO: 2713 - DNA, 20 bp, Artificial
  20-mer unique DNA sequence
cgtcaagtagtcaggcccgt

SEQ ID NO: 2714 - DNA, 20 bp, Artificial
  20-mer unique DNA sequence
caacaacgcgccagagaagg

SEQ ID NO: 2715 - DNA, 20 bp, Artificial
  20-mer unique DNA sequence
ccctccgccaacgaaacgat

SEQ ID NO: 2716 - DNA, 20 bp, Artificial
  20-mer unique DNA sequence
attgaaggcccctacgcccc

SEQ ID NO: 2717 - DNA, 20 bp, Artificial
  20-mer unique DNA sequence
agttgcaggcgggcatgtga

SEQ ID NO: 2718 - DNA, 20 bp, Artificial
  20-mer unique DNA sequence
agacacgcctaccgccgacc

SEQ ID NO: 2719 - DNA, 20 bp, Artificial
  20-mer unique DNA sequence
tttcaagggtttcgtgccgc

SEQ ID NO: 2720 - DNA, 20 bp, Artificial
  20-mer unique DNA sequence
taggttcggacagtcgagcg

SEQ ID NO: 2721 - DNA, 20 bp, Artificial
  20-mer unique DNA sequence
acaccgcgtcgaaagccacg

SEQ ID NO: 2722 - DNA, 20 bp, Artificial
  20-mer unique DNA sequence
gcccctcagtgcccctccaa

SEQ ID NO: 2723 - DNA, 20 bp, Artificial
  20-mer unique DNA sequence
tgaactatccccatcgcccc

SEQ ID NO: 2724 - DNA, 20 bp, Artificial
  20-mer unique DNA sequence
aggcgacgtgcacggtaatg

SEQ ID NO: 2725 - DNA, 20 bp, Artificial
  20-mer unique DNA sequence
gcgagagggcagcatagcgg

SEQ ID NO: 2726 - DNA, 20 bp, Artificial
  20-mer unique DNA sequence
cattttacaagcccgcggag

SEQ ID NO: 2727 - DNA, 20 bp, Artificial
  20-mer unique DNA sequence
ttcagacccccacccaaccc

SEQ ID NO: 2728 - DNA, 20 bp, Artificial
  20-mer unique DNA sequence
catcgtgggccttccgggtc

SEQ ID NO: 2729 - DNA, 20 bp, Artificial
  20-mer unique DNA sequence
tatttgggcgctcaccggtt

SEQ ID NO: 2730 - DNA, 20 bp, Artificial
  20-mer unique DNA sequence
ttctggcggctcttgctggg

SEQ ID NO: 2731 - DNA, 20 bp, Artificial
  20-mer unique DNA sequence
ttgttgctctgcccaccgtc

SEQ ID NO: 2732 - DNA, 20 bp, Artificial
  20-mer unique DNA sequence
cgccaatcccaactcgccct

SEQ ID NO: 2733 - DNA, 20 bp, Artificial
  20-mer unique DNA sequence
cgaccgcttttatggcacgc

SEQ ID NO: 2734 - DNA, 20 bp, Artificial
  20-mer unique DNA sequence
actgggcgccaacttcgaat

SEQ ID NO: 2735 - DNA, 20 bp, Artificial
  20-mer unique DNA sequence
acccgtggagcccttgcttg

SEQ ID NO: 2736 - DNA, 20 bp, Artificial
  20-mer unique DNA sequence
aacccatcccgcgaacccag

SEQ ID NO: 2737 - DNA, 20 bp, Artificial
  20-mer unique DNA sequence
cgtgggatggcggatattgc

SEQ ID NO: 2738 - DNA, 20 bp, Artificial
  20-mer unique DNA sequence
ccccagcgacgtaccaagcc

SEQ ID NO: 2739 - DNA, 20 bp, Artificial
  20-mer unique DNA sequence
gcgggaggtgcaacgagatg

SEQ ID NO: 2740 - DNA, 20 bp, Artificial
  20-mer unique DNA sequence
ctgtggacgtgctgcggctc

SEQ ID NO: 2741 - DNA, 20 bp, Artificial
  20-mer unique DNA sequence
gggcggcactaggggaaatc

SEQ ID NO: 2742 - DNA, 20 bp, Artificial
  20-mer unique DNA sequence
tggtcggctttggaatcggg

SEQ ID NO: 2743 - DNA, 20 bp, Artificial
  20-mer unique DNA sequence
tggacacagggggccgagtt

SEQ ID NO: 2744 - DNA, 20 bp, Artificial
  20-mer unique DNA sequence
ttgcgacacaacccacaccc

SEQ ID NO: 2745 - DNA, 20 bp, Artificial
  20-mer unique DNA sequence
gccgggcgaagctgaaacct

SEQ ID NO: 2746 - DNA, 20 bp, Artificial
  20-mer unique DNA sequence
ccgccacgccacctattctc

SEQ ID NO: 2747 - DNA, 20 bp, Artificial
  20-mer unique DNA sequence
tctgtccccgtgctgccata

SEQ ID NO: 2748 - DNA, 20 bp, Artificial
  20-mer unique DNA sequence
aagcagggtaagcgggggag

SEQ ID NO: 2749 - DNA, 20 bp, Artificial
  20-mer unique DNA sequence
gaggtgcccaacatttccgc

SEQ ID NO: 2750 - DNA, 20 bp, Artificial
  20-mer unique DNA sequence
cgtaatgcgctcgccgaagt

SEQ ID NO: 2751 - DNA, 20 bp, Artificial
  20-mer unique DNA sequence
aatttgcccgccctactccg

SEQ ID NO: 2752 - DNA, 20 bp, Artificial
  20-mer unique DNA sequence
acagagcggggaccagggag

SEQ ID NO: 2753 - DNA, 20 bp, Artificial
  20-mer unique DNA sequence
ccagccaagcccgtagatgc

SEQ ID NO: 2754 - DNA, 20 bp, Artificial
  20-mer unique DNA sequence
ccccggatgagaaaaggcgt

SEQ ID NO: 2755 - DNA, 20 bp, Artificial
  20-mer unique DNA sequence
acttggcaggcgtcgggttg

SEQ ID NO: 2756 - DNA, 20 bp, Artificial
  20-mer unique DNA sequence
gggatgcggaatgggatggc

SEQ ID NO: 2757 - DNA, 20 bp, Artificial
  20-mer unique DNA sequence
aaacggaaaagcagcgggtg

SEQ ID NO: 2758 - DNA, 20 bp, Artificial
  20-mer unique DNA sequence
cggtatggggtggcttcgtg

SEQ ID NO: 2759 - DNA, 20 bp, Artificial
  20-mer unique DNA sequence
aatcctgttgctcggggtgc

SEQ ID NO: 2760 - DNA, 20 bp, Artificial
  20-mer unique DNA sequence
tcggatgcgccctcacccta

SEQ ID NO: 2761 - DNA, 20 bp, Artificial
  20-mer unique DNA sequence
tcgcaagccggtcccctaat

SEQ ID NO: 2762 - DNA, 20 bp, Artificial
  20-mer unique DNA sequence
gggcgggacttctcttggct

SEQ ID NO: 2763 - DNA, 20 bp, Artificial
  20-mer unique DNA sequence
agcaagcaagcaaagccgcc

SEQ ID NO: 2764 - DNA, 20 bp, Artificial
  20-mer unique DNA sequence
aggcgcggctgacttactca

SEQ ID NO: 2765 - DNA, 20 bp, Artificial
  20-mer unique DNA sequence
tgcggccagctgacgttcat

SEQ ID NO: 2766 - DNA, 20 bp, Artificial
  20-mer unique DNA sequence
tgtatgacccccgctcccga

SEQ ID NO: 2767 - DNA, 20 bp, Artificial
  20-mer unique DNA sequence
gagaattggtggacgggggg

SEQ ID NO: 2768 - DNA, 20 bp, Artificial
  20-mer unique DNA sequence
attcactgtccccccggctg

SEQ ID NO: 2769 - DNA, 20 bp, Artificial
  20-mer unique DNA sequence
tgcctagcacccctcgagcc

SEQ ID NO: 2770 - DNA, 20 bp, Artificial
  20-mer unique DNA sequence
agaacacggcagccagagcc

SEQ ID NO: 2771 - DNA, 20 bp, Artificial
  20-mer unique DNA sequence
ccggcccctcaagtgatcgt

SEQ ID NO: 2772 - DNA, 20 bp, Artificial
  20-mer unique DNA sequence
tcgtcccatccaacccctcc

SEQ ID NO: 2773 - DNA, 20 bp, Artificial
  20-mer unique DNA sequence
catcccggctcctcgtccgc

SEQ ID NO: 2774 - DNA, 20 bp, Artificial
  20-mer unique DNA sequence
agaagatgctggggtgggcg

SEQ ID NO: 2775 - DNA, 20 bp, Artificial
  20-mer unique DNA sequence
catcccgcttcgcccatctt

SEQ ID NO: 2776 - DNA, 20 bp, Artificial
  20-mer unique DNA sequence
ccgtcccgctcctctcactc

SEQ ID NO: 2777 - DNA, 20 bp, Artificial
  20-mer unique DNA sequence
cccacccaacggcacctaac

SEQ ID NO: 2778 - DNA, 20 bp, Artificial
  20-mer unique DNA sequence
agccccgaaaccacaccgta

SEQ ID NO: 2779 - DNA, 20 bp, Artificial
  20-mer unique DNA sequence
aacaacagcgaaccagcgcc

SEQ ID NO: 2780 - DNA, 20 bp, Artificial
  20-mer unique DNA sequence
caacaactgggcgccgataa

SEQ ID NO: 2781 - DNA, 20 bp, Artificial
  20-mer unique DNA sequence
cgcgcgggtttctccctaat

SEQ ID NO: 2782 - DNA, 20 bp, Artificial
  20-mer unique DNA sequence
cggttcggtcttcgtgcgtg

SEQ ID NO: 2783 - DNA, 20 bp, Artificial
  20-mer unique DNA sequence
cgcgtttcacatccttgggc

SEQ ID NO: 2784 - DNA, 20 bp, Artificial
  20-mer unique DNA sequence
tgagggatggaatggcggtg

SEQ ID NO: 2785 - DNA, 20 bp, Artificial
  20-mer unique DNA sequence
ttttggataccctcccccgg

SEQ ID NO: 2786 - DNA, 20 bp, Artificial
  20-mer unique DNA sequence
agcagtcggcggcattttgg

SEQ ID NO: 2787 - DNA, 20 bp, Artificial
  20-mer unique DNA sequence
atacccaggtcggtttcgcg

SEQ ID NO: 2788 - DNA, 20 bp, Artificial
  20-mer unique DNA sequence
tacagcgtggcacactcgtc

SEQ ID NO: 2789 - DNA, 20 bp, Artificial
  20-mer unique DNA sequence
agccagcgctagatctgcca

SEQ ID NO: 2790 - DNA, 20 bp, Artificial
  20-mer unique DNA sequence
cgtgccccattttcccagcc

SEQ ID NO: 2791 - DNA, 20 bp, Artificial
  20-mer unique DNA sequence
tgtgtcccgtccctttggcg

SEQ ID NO: 2792 - DNA, 20 bp, Artificial
  20-mer unique DNA sequence
gtggggcgactgctgttggt

SEQ ID NO: 2793 - DNA, 20 bp, Artificial
  20-mer unique DNA sequence
ggggcgtttgcaggggtagg

SEQ ID NO: 2794 - DNA, 20 bp, Artificial
  20-mer unique DNA sequence
tacctgggcgtgcactttcg

SEQ ID NO: 2795 - DNA, 20 bp, Artificial
  20-mer unique DNA sequence
tcagatcgcccctcaccagc

SEQ ID NO: 2796 - DNA, 20 bp, Artificial
  20-mer unique DNA sequence
cgcccaacccccctatcctt

SEQ ID NO: 2797 - DNA, 20 bp, Artificial
  20-mer unique DNA sequence
aggcgtggcgtgtggtctcg

SEQ ID NO: 2798 - DNA, 20 bp, Artificial
  20-mer unique DNA sequence
gtctgtcatcgcgggccctc

SEQ ID NO: 2799 - DNA, 20 bp, Artificial
  20-mer unique DNA sequence
gggcgccggcaaaacctata

SEQ ID NO: 2800 - DNA, 20 bp, Artificial
  20-mer unique DNA sequence
ccgacccgttaaggccaaag

SEQ ID NO: 2801 - DNA, 20 bp, Artificial
  20-mer unique DNA sequence
ccgacgtccacttaagcgca

SEQ ID NO: 2802 - DNA, 20 bp, Artificial
  20-mer unique DNA sequence
acggccagcctgactaacga

SEQ ID NO: 2803 - DNA, 20 bp, Artificial
  20-mer unique DNA sequence
cgccccaacgcaccactctt

SEQ ID NO: 2804 - DNA, 20 bp, Artificial
  20-mer unique DNA sequence
aggaggagaggcaaggcggg

SEQ ID NO: 2805 - DNA, 20 bp, Artificial
  20-mer unique DNA sequence
cacttgaacccaccccccca

SEQ ID NO: 2806 - DNA, 20 bp, Artificial
  20-mer unique DNA sequence
caggcgcccaggaaacacca

SEQ ID NO: 2807 - DNA, 20 bp, Artificial
  20-mer unique DNA sequence
acttgacatggaggccccgg

SEQ ID NO: 2808 - DNA, 20 bp, Artificial
  20-mer unique DNA sequence
ccataaagggctcccggcaa

SEQ ID NO: 2809 - DNA, 20 bp, Artificial
  20-mer unique DNA sequence
cggccgagccaatgtcaagt

SEQ ID NO: 2810 - DNA, 20 bp, Artificial
  20-mer unique DNA sequence
gcggggggctagtcatgagg

SEQ ID NO: 2811 - DNA, 20 bp, Artificial
  20-mer unique DNA sequence
ttgcacccagctcgtcgtcg

SEQ ID NO: 2812 - DNA, 20 bp, Artificial
  20-mer unique DNA sequence
cgcacatggggtctcggatt

SEQ ID NO: 2813 - DNA, 20 bp, Artificial
  20-mer unique DNA sequence
cgcccgcgataaagcgaaca

SEQ ID NO: 2814 - DNA, 20 bp, Artificial
  20-mer unique DNA sequence
cgcccgatttacggtcacgt

SEQ ID NO: 2815 - DNA, 20 bp, Artificial
  20-mer unique DNA sequence
cacccccgtacgcaaccact

SEQ ID NO: 2816 - DNA, 20 bp, Artificial
  20-mer unique DNA sequence
aatggacccacacccttcgg

SEQ ID NO: 2817 - DNA, 20 bp, Artificial
  20-mer unique DNA sequence
cccgtgtcgcctgaggtgtc

SEQ ID NO: 2818 - DNA, 20 bp, Artificial
  20-mer unique DNA sequence
tacgcacccctcgccttacc

SEQ ID NO: 2819 - DNA, 20 bp, Artificial
  20-mer unique DNA sequence
ggcgggtgtcaagggagcgt

SEQ ID NO: 2820 - DNA, 20 bp, Artificial
  20-mer unique DNA sequence
tgtcttcctccccccatgtc

SEQ ID NO: 2821 - DNA, 20 bp, Artificial
  20-mer unique DNA sequence
gcgcgatgaagggagggaag

SEQ ID NO: 2822 - DNA, 20 bp, Artificial
  20-mer unique DNA sequence
aaatgccgtagggcgagggg

SEQ ID NO: 2823 - DNA, 20 bp, Artificial
  20-mer unique DNA sequence
gagcctttgttcccccccga

SEQ ID NO: 2824 - DNA, 20 bp, Artificial
  20-mer unique DNA sequence
tggtgttggtcggcgctttt

SEQ ID NO: 2825 - DNA, 20 bp, Artificial
  20-mer unique DNA sequence
atgctcgcgcttttctccca

SEQ ID NO: 2826 - DNA, 20 bp, Artificial
  20-mer unique DNA sequence
accaaaccaaggccacccaa

SEQ ID NO: 2827 - DNA, 20 bp, Artificial
  20-mer unique DNA sequence
acgatgaaggggcggggact

SEQ ID NO: 2828 - DNA, 20 bp, Artificial
  20-mer unique DNA sequence
ccagccgccagcacaaatcc

SEQ ID NO: 2829 - DNA, 20 bp, Artificial
  20-mer unique DNA sequence
ctccgcacctcgcctcagaa

SEQ ID NO: 2830 - DNA, 20 bp, Artificial
  20-mer unique DNA sequence
tacctggcgccttgaatccg

SEQ ID NO: 2831 - DNA, 20 bp, Artificial
  20-mer unique DNA sequence
gaccaacctcagcccgctac

SEQ ID NO: 2832 - DNA, 20 bp, Artificial
  20-mer unique DNA sequence
ccgctcgtccctctttcctg

SEQ ID NO: 2833 - DNA, 20 bp, Artificial
  20-mer unique DNA sequence
tgcagccacaaacccaagcg

SEQ ID NO: 2834 - DNA, 20 bp, Artificial
  20-mer unique DNA sequence
atacaagatccggccgtggg

SEQ ID NO: 2835 - DNA, 20 bp, Artificial
  20-mer unique DNA sequence
gtggcggttgttcttgcgtg

SEQ ID NO: 2836 - DNA, 20 bp, Artificial
  20-mer unique DNA sequence
tcggatgtaagcgttggccc

SEQ ID NO: 2837 - DNA, 20 bp, Artificial
  20-mer unique DNA sequence
gccattctgcccggactcac

SEQ ID NO: 2838 - DNA, 20 bp, Artificial
  20-mer unique DNA sequence
tcccgtcatagcccttcccg

SEQ ID NO: 2839 - DNA, 20 bp, Artificial
  20-mer unique DNA sequence
aatgggcggggagtagggga

SEQ ID NO: 2840 - DNA, 20 bp, Artificial
  20-mer unique DNA sequence
ccgttgccgtgtgtatgcgt

SEQ ID NO: 2841 - DNA, 20 bp, Artificial
  20-mer unique DNA sequence
tgcttgcggcgacggtaggt

SEQ ID NO: 2842 - DNA, 20 bp, Artificial
  20-mer unique DNA sequence
aaatccgcctcctcccccta

SEQ ID NO: 2843 - DNA, 20 bp, Artificial
  20-mer unique DNA sequence
agggggattagcggtgcagg

SEQ ID NO: 2844 - DNA, 20 bp, Artificial
  20-mer unique DNA sequence
gcgctgcaccccgacaaatc

SEQ ID NO: 2845 - DNA, 20 bp, Artificial
  20-mer unique DNA sequence
tgctctccgtccttacccgc

SEQ ID NO: 2846 - DNA, 20 bp, Artificial
  20-mer unique DNA sequence
agttggggcagcgtggtgaa

SEQ ID NO: 2847 - DNA, 20 bp, Artificial
  20-mer unique DNA sequence
taggggatattcggacgcgg

SEQ ID NO: 2848 - DNA, 20 bp, Artificial
  20-mer unique DNA sequence
caatcctccaccaccacgca

SEQ ID NO: 2849 - DNA, 20 bp, Artificial
  20-mer unique DNA sequence
cggggcggcaatcgataaaa

SEQ ID NO: 2850 - DNA, 20 bp, Artificial
  20-mer unique DNA sequence
acccctctgcaccaatgccg

SEQ ID NO: 2851 - DNA, 20 bp, Artificial
  20-mer unique DNA sequence
atgcccaaagaccgcccctg

SEQ ID NO: 2852 - DNA, 20 bp, Artificial
  20-mer unique DNA sequence
tgaccccgctttgttgagcc

SEQ ID NO: 2853 - DNA, 20 bp, Artificial
  20-mer unique DNA sequence
ggcataactcaggggcagcg

SEQ ID NO: 2854 - DNA, 20 bp, Artificial
  20-mer unique DNA sequence
gctgcgggggattggaggac

SEQ ID NO: 2855 - DNA, 20 bp, Artificial
  20-mer unique DNA sequence
tctcgtggttggtgcgtgcc

SEQ ID NO: 2856 - DNA, 20 bp, Artificial
  20-mer unique DNA sequence
cgcgatgttacggggctacg

SEQ ID NO: 2857 - DNA, 20 bp, Artificial
  20-mer unique DNA sequence
cccgcgtgtctgctgcaata

SEQ ID NO: 2858 - DNA, 20 bp, Artificial
  20-mer unique DNA sequence
ctgggctcgttgcgtgatca

SEQ ID NO: 2859 - DNA, 20 bp, Artificial
  20-mer unique DNA sequence
acatcaagggcgcgacaggt

SEQ ID NO: 2860 - DNA, 20 bp, Artificial
  20-mer unique DNA sequence
aagtgtgggctcgtgggggg

SEQ ID NO: 2861 - DNA, 20 bp, Artificial
  20-mer unique DNA sequence
aaatgagcggttgcggtcgt

SEQ ID NO: 2862 - DNA, 20 bp, Artificial
  20-mer unique DNA sequence
taaatcggggcttcacggct

SEQ ID NO: 2863 - DNA, 20 bp, Artificial
  20-mer unique DNA sequence
acgcaccaactccgccgaat

SEQ ID NO: 2864 - DNA, 20 bp, Artificial
  20-mer unique DNA sequence
tcacttcgcccacttccgct

SEQ ID NO: 2865 - DNA, 20 bp, Artificial
  20-mer unique DNA sequence
tacctgttctgtccccgcgc

SEQ ID NO: 2866 - DNA, 20 bp, Artificial
  20-mer unique DNA sequence
acgggcggtggtgatttgct

SEQ ID NO: 2867 - DNA, 20 bp, Artificial
  20-mer unique DNA sequence
aaatgctgggggtcgtggct

SEQ ID NO: 2868 - DNA, 20 bp, Artificial
  20-mer unique DNA sequence
caacaggggcgtacgggcag

SEQ ID NO: 2869 - DNA, 20 bp, Artificial
  20-mer unique DNA sequence
gtctgggtggtgcgtgtcgc

SEQ ID NO: 2870 - DNA, 20 bp, Artificial
  20-mer unique DNA sequence
ttcttacccgcctgtcccga

SEQ ID NO: 2871 - DNA, 20 bp, Artificial
  20-mer unique DNA sequence
cgctattgccttggatccga

SEQ ID NO: 2872 - DNA, 20 bp, Artificial
  20-mer unique DNA sequence
cagggggaggtcgtatggcc

SEQ ID NO: 2873 - DNA, 20 bp, Artificial
  20-mer unique DNA sequence
attgggtacggcgcagggtt

SEQ ID NO: 2874 - DNA, 20 bp, Artificial
  20-mer unique DNA sequence
tttgttttcgggtgcggatg

SEQ ID NO: 2875 - DNA, 20 bp, Artificial
  20-mer unique DNA sequence
caccaccaaccgcgccatag

SEQ ID NO: 2876 - DNA, 20 bp, Artificial
  20-mer unique DNA sequence
actgggaacgcaaggcgggt

SEQ ID NO: 2877 - DNA, 20 bp, Artificial
  20-mer unique DNA sequence
attccctccctctgccgggt

SEQ ID NO: 2878 - DNA, 20 bp, Artificial
  20-mer unique DNA sequence
atcgcggcatatacccctgc

SEQ ID NO: 2879 - DNA, 20 bp, Artificial
  20-mer unique DNA sequence
gaaattgcgacctggcggtg

SEQ ID NO: 2880 - DNA, 20 bp, Artificial
  20-mer unique DNA sequence
acaccacgctccttcgcaaa

SEQ ID NO: 2881 - DNA, 20 bp, Artificial
  20-mer unique DNA sequence
cgtacaaatggggggggaca

SEQ ID NO: 2882 - DNA, 20 bp, Artificial
  20-mer unique DNA sequence
cgcggcacattccacccttc

SEQ ID NO: 2883 - DNA, 20 bp, Artificial
  20-mer unique DNA sequence
acttcattcctgcatcgggg

SEQ ID NO: 2884 - DNA, 20 bp, Artificial
  20-mer unique DNA sequence
cagtgccctccgttgaccgt

SEQ ID NO: 2885 - DNA, 20 bp, Artificial
  20-mer unique DNA sequence
cgtgggcaggacagaagcag

SEQ ID NO: 2886 - DNA, 20 bp, Artificial
  20-mer unique DNA sequence
tttgtccggtctttcgcgcg

SEQ ID NO: 2887 - DNA, 20 bp, Artificial
  20-mer unique DNA sequence
ggctcccgcttcgcttattg

SEQ ID NO: 2888 - DNA, 20 bp, Artificial
  20-mer unique DNA sequence
tgggaaacgtggtggggtga

SEQ ID NO: 2889 - DNA, 20 bp, Artificial
  20-mer unique DNA sequence
cccttggctgtttcggttcc

SEQ ID NO: 2890 - DNA, 20 bp, Artificial
  20-mer unique DNA sequence
agacacttggcccaggacag

SEQ ID NO: 2891 - DNA, 20 bp, Artificial
  20-mer unique DNA sequence
gtatgccgctaacgccgaga

SEQ ID NO: 2892 - DNA, 20 bp, Artificial
  20-mer unique DNA sequence
agttaggcttggcgttggcg

SEQ ID NO: 2893 - DNA, 20 bp, Artificial
  20-mer unique DNA sequence
atgcggccggaatttgtgtg

SEQ ID NO: 2894 - DNA, 20 bp, Artificial
  20-mer unique DNA sequence
ccaggggcaacgattaaggc

SEQ ID NO: 2895 - DNA, 20 bp, Artificial
  20-mer unique DNA sequence
cgttccgtgcgcttcctatg

SEQ ID NO: 2896 - DNA, 20 bp, Artificial
  20-mer unique DNA sequence
actatcacaaagcggcggca

SEQ ID NO: 2897 - DNA, 20 bp, Artificial
  20-mer unique DNA sequence
ccgcagcaccccaacactct

SEQ ID NO: 2898 - DNA, 20 bp, Artificial
  20-mer unique DNA sequence
gtgcggtctttggcaggcag

SEQ ID NO: 2899 - DNA, 20 bp, Artificial
  20-mer unique DNA sequence
agacgcccgttgcggattga

SEQ ID NO: 2900 - DNA, 20 bp, Artificial
  20-mer unique DNA sequence
cgagcgcgatcaaccgagaa

SEQ ID NO: 2901 - DNA, 20 bp, Artificial
  20-mer unique DNA sequence
cgttctgcctcccaccacct

SEQ ID NO: 2902 - DNA, 20 bp, Artificial
  20-mer unique DNA sequence
tgacatgtaccgcgaggccg

SEQ ID NO: 2903 - DNA, 20 bp, Artificial
  20-mer unique DNA sequence
tccctgagcccacaaaccct

SEQ ID NO: 2904 - DNA, 20 bp, Artificial
  20-mer unique DNA sequence
ggttgcccaggctgattcga

SEQ ID NO: 2905 - DNA, 20 bp, Artificial
  20-mer unique DNA sequence
gtgccgttgtggggccctct

SEQ ID NO: 2906 - DNA, 20 bp, Artificial
  20-mer unique DNA sequence
cagcctcccgccttcacgac

SEQ ID NO: 2907 - DNA, 20 bp, Artificial
  20-mer unique DNA sequence
gcttcagcgactcggatcgt

SEQ ID NO: 2908 - DNA, 20 bp, Artificial
  20-mer unique DNA sequence
cgggtcaaaactgggggcaa

SEQ ID NO: 2909 - DNA, 20 bp, Artificial
  20-mer unique DNA sequence
aaaatctaccatgggccgcg

SEQ ID NO: 2910 - DNA, 20 bp, Artificial
  20-mer unique DNA sequence
tccccggaagtttggagccc

SEQ ID NO: 2911 - DNA, 20 bp, Artificial
  20-mer unique DNA sequence
accgggagggcttgggattc

SEQ ID NO: 2912 - DNA, 20 bp, Artificial
  20-mer unique DNA sequence
ccacggacgtagtccgcaat

SEQ ID NO: 2913 - DNA, 20 bp, Artificial
  20-mer unique DNA sequence
gattttagcgcgcgtccatg

SEQ ID NO: 2914 - DNA, 20 bp, Artificial
  20-mer unique DNA sequence
gtaggcatttgggaggcgag

SEQ ID NO: 2915 - DNA, 20 bp, Artificial
  20-mer unique DNA sequence
atgacccacaccctgccccc

SEQ ID NO: 2916 - DNA, 20 bp, Artificial
  20-mer unique DNA sequence
tctcacaagggctcacgcga

SEQ ID NO: 2917 - DNA, 20 bp, Artificial
  20-mer unique DNA sequence
gccttccagcagtccggtcc

SEQ ID NO: 2918 - DNA, 20 bp, Artificial
  20-mer unique DNA sequence
gcctggtggcgcgtttttca

SEQ ID NO: 2919 - DNA, 20 bp, Artificial
  20-mer unique DNA sequence
tcaaggggtgcgcgggtaga

SEQ ID NO: 2920 - DNA, 20 bp, Artificial
  20-mer unique DNA sequence
ctacacggtcacaggcgcat

SEQ ID NO: 2921 - DNA, 20 bp, Artificial
  20-mer unique DNA sequence
tggcgtggctctcaaatgga

SEQ ID NO: 2922 - DNA, 20 bp, Artificial
  20-mer unique DNA sequence
tcagccaccccaagcccatc

SEQ ID NO: 2923 - DNA, 20 bp, Artificial
  20-mer unique DNA sequence
agggtggtggcgacgaacaa

SEQ ID NO: 2924 - DNA, 20 bp, Artificial
  20-mer unique DNA sequence
gtgctgcggcggaagaaaag

SEQ ID NO: 2925 - DNA, 20 bp, Artificial
  20-mer unique DNA sequence
tttccacgccggacccagac

SEQ ID NO: 2926 - DNA, 20 bp, Artificial
  20-mer unique DNA sequence
cgtgccacccaatgacaact

SEQ ID NO: 2927 - DNA, 20 bp, Artificial
  20-mer unique DNA sequence
gcctgtgtgttcggggatcg

SEQ ID NO: 2928 - DNA, 20 bp, Artificial
  20-mer unique DNA sequence
cggttgggaagttgggtgcc

SEQ ID NO: 2929 - DNA, 20 bp, Artificial
  20-mer unique DNA sequence
agatactctcttcggccgcg

SEQ ID NO: 2930 - DNA, 20 bp, Artificial
  20-mer unique DNA sequence
aaatgtcgagcggaggggtg

SEQ ID NO: 2931 - DNA, 20 bp, Artificial
  20-mer unique DNA sequence
cagccgggacgaatggaaac

SEQ ID NO: 2932 - DNA, 20 bp, Artificial
  20-mer unique DNA sequence
tttcccgccaccttccagtc

SEQ ID NO: 2933 - DNA, 20 bp, Artificial
  20-mer unique DNA sequence
ggggggctttccagtggggt

SEQ ID NO: 2934 - DNA, 20 bp, Artificial
  20-mer unique DNA sequence
accaacaccgccccgtaaac

SEQ ID NO: 2935 - DNA, 20 bp, Artificial
  20-mer unique DNA sequence
ccacccacatcgcctctcgt

SEQ ID NO: 2936 - DNA, 20 bp, Artificial
  20-mer unique DNA sequence
gctcctgactgtacgcgaga

SEQ ID NO: 2937 - DNA, 20 bp, Artificial
  20-mer unique DNA sequence
gctggaaaatccgttgcccg

SEQ ID NO: 2938 - DNA, 20 bp, Artificial
  20-mer unique DNA sequence
gaactgccaatgcccctcgg

SEQ ID NO: 2939 - DNA, 20 bp, Artificial
  20-mer unique DNA sequence
cgagctcctctcactgggcg

SEQ ID NO: 2940 - DNA, 20 bp, Artificial
  20-mer unique DNA sequence
cctagaacccatgcgcctcg

SEQ ID NO: 2941 - DNA, 20 bp, Artificial
  20-mer unique DNA sequence
tgcggggatttgcaacggta

SEQ ID NO: 2942 - DNA, 20 bp, Artificial
  20-mer unique DNA sequence
ttacacgtccgcggggccaa

SEQ ID NO: 2943 - DNA, 20 bp, Artificial
  20-mer unique DNA sequence
gtgatgttgggagcacgcgc

SEQ ID NO: 2944 - DNA, 20 bp, Artificial
  20-mer unique DNA sequence
agaagcgagggggacagcgg

SEQ ID NO: 2945 - DNA, 20 bp, Artificial
  20-mer unique DNA sequence
ggctagcggaaggccaggtc

SEQ ID NO: 2946 - DNA, 20 bp, Artificial
  20-mer unique DNA sequence
gctggcggtttaaagggctg

SEQ ID NO: 2947 - DNA, 20 bp, Artificial
  20-mer unique DNA sequence
ttaactatggacgggggcgg

SEQ ID NO: 2948 - DNA, 20 bp, Artificial
  20-mer unique DNA sequence
tgagcggccggaggttatgg

SEQ ID NO: 2949 - DNA, 20 bp, Artificial
  20-mer unique DNA sequence
gtacgaatcccaacccggcg

SEQ ID NO: 2950 - DNA, 20 bp, Artificial
  20-mer unique DNA sequence
ctcatcccgccccattgctt

SEQ ID NO: 2951 - DNA, 20 bp, Artificial
  20-mer unique DNA sequence
gcgggggggtaatcaaatgg

SEQ ID NO: 2952 - DNA, 20 bp, Artificial
  20-mer unique DNA sequence
cacgcgtccccacccttctg

SEQ ID NO: 2953 - DNA, 20 bp, Artificial
  20-mer unique DNA sequence
tcggttcagggagcagggtt

SEQ ID NO: 2954 - DNA, 20 bp, Artificial
  20-mer unique DNA sequence
cgcgaatgacgggactacca

SEQ ID NO: 2955 - DNA, 20 bp, Artificial
  20-mer unique DNA sequence
tgaactcttagcgtgccccg

SEQ ID NO: 2956 - DNA, 20 bp, Artificial
  20-mer unique DNA sequence
tgggcggtgggcgaataaga

SEQ ID NO: 2957 - DNA, 20 bp, Artificial
  20-mer unique DNA sequence
cctctcttgcttcgcctccg

SEQ ID NO: 2958 - DNA, 20 bp, Artificial
  20-mer unique DNA sequence
gggggccgcgatagtcactg

SEQ ID NO: 2959 - DNA, 20 bp, Artificial
  20-mer unique DNA sequence
gttaacggccactccgccca

SEQ ID NO: 2960 - DNA, 20 bp, Artificial
  20-mer unique DNA sequence
aagggccgcggtgtttgtaa

SEQ ID NO: 2961 - DNA, 20 bp, Artificial
  20-mer unique DNA sequence
gagccaaccccacgaccaag

SEQ ID NO: 2962 - DNA, 20 bp, Artificial
  20-mer unique DNA sequence
ggcggccgtgagaggaagag

SEQ ID NO: 2963 - DNA, 20 bp, Artificial
  20-mer unique DNA sequence
cagtcgagggcggggatttc

SEQ ID NO: 2964 - DNA, 20 bp, Artificial
  20-mer unique DNA sequence
cacagtccccgatccagcaa

SEQ ID NO: 2965 - DNA, 20 bp, Artificial
  20-mer unique DNA sequence
gacaggttcaggccagcggt

SEQ ID NO: 2966 - DNA, 20 bp, Artificial
  20-mer unique DNA sequence
tgcgacccgcgatctactgt

SEQ ID NO: 2967 - DNA, 20 bp, Artificial
  20-mer unique DNA sequence
atgccgcctacggacgtaca

SEQ ID NO: 2968 - DNA, 20 bp, Artificial
  20-mer unique DNA sequence
gcgccctagtacgtgtccat

SEQ ID NO: 2969 - DNA, 20 bp, Artificial
  20-mer unique DNA sequence
acgactaccagaggcccgat

SEQ ID NO: 2970 - DNA, 20 bp, Artificial
  20-mer unique DNA sequence
gggccagtcccacgtttaca

SEQ ID NO: 2971 - DNA, 20 bp, Artificial
  20-mer unique DNA sequence
aggcgaagggcgatttgagc

SEQ ID NO: 2972 - DNA, 20 bp, Artificial
  20-mer unique DNA sequence
ggccccacccaactcgctgt

SEQ ID NO: 2973 - DNA, 20 bp, Artificial
  20-mer unique DNA sequence
tgcaggtcttgggggtcgtc

SEQ ID NO: 2974 - DNA, 20 bp, Artificial
  20-mer unique DNA sequence
tggctggatttggttcggga

SEQ ID NO: 2975 - DNA, 20 bp, Artificial
  20-mer unique DNA sequence
ctgttcccactcgcccctcg

SEQ ID NO: 2976 - DNA, 20 bp, Artificial
  20-mer unique DNA sequence
cattgcctaggctgcggaca

SEQ ID NO: 2977 - DNA, 20 bp, Artificial
  20-mer unique DNA sequence
cgtggatgcggggaaacgac

SEQ ID NO: 2978 - DNA, 20 bp, Artificial
  20-mer unique DNA sequence
gaaccccaccccagcgaaat

SEQ ID NO: 2979 - DNA, 20 bp, Artificial
  20-mer unique DNA sequence
cgcttgagtgcccgatggag

SEQ ID NO: 2980 - DNA, 20 bp, Artificial
  20-mer unique DNA sequence
cgcccaataggtcttcgccc

SEQ ID NO: 2981 - DNA, 20 bp, Artificial
  20-mer unique DNA sequence
ccacgcgtctgtaatccccg

SEQ ID NO: 2982 - DNA, 20 bp, Artificial
  20-mer unique DNA sequence
tgattctcgggctggtgtgc

SEQ ID NO: 2983 - DNA, 20 bp, Artificial
  20-mer unique DNA sequence
tgtctcgtcatcccacccgc

SEQ ID NO: 2984 - DNA, 20 bp, Artificial
  20-mer unique DNA sequence
ctggggacaaccgaaggcga

SEQ ID NO: 2985 - DNA, 20 bp, Artificial
  20-mer unique DNA sequence
agctggggccttgtcacgtg

SEQ ID NO: 2986 - DNA, 20 bp, Artificial
  20-mer unique DNA sequence
cagcacccccatcccctttg

SEQ ID NO: 2987 - DNA, 20 bp, Artificial
  20-mer unique DNA sequence
tggatggcgctatggtgtgg

SEQ ID NO: 2988 - DNA, 20 bp, Artificial
  20-mer unique DNA sequence
atcgtcgctcaccctctcgg

SEQ ID NO: 2989 - DNA, 20 bp, Artificial
  20-mer unique DNA sequence
cctttccttccatcgcgcag

SEQ ID NO: 2990 - DNA, 20 bp, Artificial
  20-mer unique DNA sequence
atgacagaagcggcaggcaa

SEQ ID NO: 2991 - DNA, 20 bp, Artificial
  20-mer unique DNA sequence
tgcccttcactttgtcgccc

SEQ ID NO: 2992 - DNA, 20 bp, Artificial
  20-mer unique DNA sequence
tggcagtcgggggctaaaaa

SEQ ID NO: 2993 - DNA, 20 bp, Artificial
  20-mer unique DNA sequence
ggggggagatcggcatggag

SEQ ID NO: 2994 - DNA, 20 bp, Artificial
  20-mer unique DNA sequence
gccaatccaccgcagacatg

SEQ ID NO: 2995 - DNA, 20 bp, Artificial
  20-mer unique DNA sequence
cacccgcgctcgatcataaa

SEQ ID NO: 2996 - DNA, 20 bp, Artificial
  20-mer unique DNA sequence
cgtggttcctcgtgctcgcc

SEQ ID NO: 2997 - DNA, 20 bp, Artificial
  20-mer unique DNA sequence
ctcttccgtccagttcgccg

SEQ ID NO: 2998 - DNA, 20 bp, Artificial
  20-mer unique DNA sequence
taaggtcgagacgcgggttg

SEQ ID NO: 2999 - DNA, 20 bp, Artificial
  20-mer unique DNA sequence
ggtgccgatcagtgcctgtt

SEQ ID NO: 3000 - DNA, 20 bp, Artificial
  20-mer unique DNA sequence
ccctactatgcccgccattg

SEQ ID NO: 3001 - DNA, 20 bp, Artificial
  20-mer unique DNA sequence
tcgcaatcgggaaatcgtcc

SEQ ID NO: 3002 - DNA, 20 bp, Artificial
  20-mer unique DNA sequence
accatcgcgccttcacaaaa

SEQ ID NO: 3003 - DNA, 20 bp, Artificial
  20-mer unique DNA sequence
cgtcgttttgcgcccctagc

SEQ ID NO: 3004 - DNA, 20 bp, Artificial
  20-mer unique DNA sequence
aatcaggttcccagggcgac

SEQ ID NO: 3005 - DNA, 20 bp, Artificial
  20-mer unique DNA sequence
tgcctgtcggatggtcactc

SEQ ID NO: 3006 - DNA, 20 bp, Artificial
  20-mer unique DNA sequence
cccggtaccccctgcaaatg

SEQ ID NO: 3007 - DNA, 20 bp, Artificial
  20-mer unique DNA sequence
attctcccgccgtccaacaa

SEQ ID NO: 3008 - DNA, 20 bp, Artificial
  20-mer unique DNA sequence
ctatggattgcggtcgagcc

SEQ ID NO: 3009 - DNA, 20 bp, Artificial
  20-mer unique DNA sequence
ctttttcgaccccaccgctc

SEQ ID NO: 3010 - DNA, 20 bp, Artificial
  20-mer unique DNA sequence
gctgaacaataaccccgccg

SEQ ID NO: 3011 - DNA, 20 bp, Artificial
  20-mer unique DNA sequence
ggagaagggatcggaacggc

SEQ ID NO: 3012 - DNA, 20 bp, Artificial
  20-mer unique DNA sequence
tagctccatccgccactgca

SEQ ID NO: 3013 - DNA, 20 bp, Artificial
  20-mer unique DNA sequence
tgcagccacgatagaccgcc

SEQ ID NO: 3014 - DNA, 20 bp, Artificial
  20-mer unique DNA sequence
gcatgcgccggtaagctcgt

SEQ ID NO: 3015 - DNA, 20 bp, Artificial
  20-mer unique DNA sequence
acgaaagcgccagcaacagg

SEQ ID NO: 3016 - DNA, 20 bp, Artificial
  20-mer unique DNA sequence
ccaccagcagcagttccccg

SEQ ID NO: 3017 - DNA, 20 bp, Artificial
  20-mer unique DNA sequence
cccgcaaactcaccccctgt

SEQ ID NO: 3018 - DNA, 20 bp, Artificial
  20-mer unique DNA sequence
accctaggcgttagcgtggt

SEQ ID NO: 3019 - DNA, 20 bp, Artificial
  20-mer unique DNA sequence
cgtgatcgccgactaaggct

SEQ ID NO: 3020 - DNA, 20 bp, Artificial
  20-mer unique DNA sequence
cacaccagccctccaaccgt

SEQ ID NO: 3021 - DNA, 20 bp, Artificial
  20-mer unique DNA sequence
cttccgacccgacaaccctc

SEQ ID NO: 3022 - DNA, 20 bp, Artificial
  20-mer unique DNA sequence
ccggtgagggactggctgag

SEQ ID NO: 3023 - DNA, 20 bp, Artificial
  20-mer unique DNA sequence
atccacgcgtcaccaaaggc

SEQ ID NO: 3024 - DNA, 20 bp, Artificial
  20-mer unique DNA sequence
ccctatgaccccaccgcctt

SEQ ID NO: 3025 - DNA, 20 bp, Artificial
  20-mer unique DNA sequence
gccgaacctccacaaccagg

SEQ ID NO: 3026 - DNA, 20 bp, Artificial
  20-mer unique DNA sequence
tggaggtgcccgggaaggag

SEQ ID NO: 3027 - DNA, 20 bp, Artificial
  20-mer unique DNA sequence
tccgatgagcggcgaacaat

SEQ ID NO: 3028 - DNA, 20 bp, Artificial
  20-mer unique DNA sequence
taatggtgttgccccgtgcg

SEQ ID NO: 3029 - DNA, 20 bp, Artificial
  20-mer unique DNA sequence
atgctgtgcgcgggttattg

SEQ ID NO: 3030 - DNA, 20 bp, Artificial
  20-mer unique DNA sequence
agggcgtgttgtcgggatct

SEQ ID NO: 3031 - DNA, 20 bp, Artificial
  20-mer unique DNA sequence
caccacctcgcgaacaaccg

SEQ ID NO: 3032 - DNA, 20 bp, Artificial
  20-mer unique DNA sequence
ggggtttgacggggcgaagt

SEQ ID NO: 3033 - DNA, 20 bp, Artificial
  20-mer unique DNA sequence
ttccgctttgtccgctcctg

SEQ ID NO: 3034 - DNA, 20 bp, Artificial
  20-mer unique DNA sequence
ccacccccgtcgctcatcct

SEQ ID NO: 3035 - DNA, 20 bp, Artificial
  20-mer unique DNA sequence
gacgatccggagtgggcaaa

SEQ ID NO: 3036 - DNA, 20 bp, Artificial
  20-mer unique DNA sequence
accgcgatagccatttcccc

SEQ ID NO: 3037 - DNA, 20 bp, Artificial
  20-mer unique DNA sequence
ttcatcaaactctccgcgcg

SEQ ID NO: 3038 - DNA, 20 bp, Artificial
  20-mer unique DNA sequence
tcgcgggggtgggtctttta

SEQ ID NO: 3039 - DNA, 20 bp, Artificial
  20-mer unique DNA sequence
gtctttggttcccccgctcg

SEQ ID NO: 3040 - DNA, 20 bp, Artificial
  20-mer unique DNA sequence
tcagcaagcccgcaacgtac

SEQ ID NO: 3041 - DNA, 20 bp, Artificial
  20-mer unique DNA sequence
tgtccttcccggtgtgcctc

SEQ ID NO: 3042 - DNA, 20 bp, Artificial
  20-mer unique DNA sequence
gttgcggccagcgtatgaaa

SEQ ID NO: 3043 - DNA, 20 bp, Artificial
  20-mer unique DNA sequence
gttctcaccccggcatttgg

SEQ ID NO: 3044 - DNA, 20 bp, Artificial
  20-mer unique DNA sequence
cacgtgctatctcaccggga

SEQ ID NO: 3045 - DNA, 20 bp, Artificial
  20-mer unique DNA sequence
acacgtacgagccacgaagc

SEQ ID NO: 3046 - DNA, 20 bp, Artificial
  20-mer unique DNA sequence
cgggtaggagcggatgatgg

SEQ ID NO: 3047 - DNA, 20 bp, Artificial
  20-mer unique DNA sequence
acagtactcgccgcgcccac

SEQ ID NO: 3048 - DNA, 20 bp, Artificial
  20-mer unique DNA sequence
aaaggccgcaccgcaagaaa

SEQ ID NO: 3049 - DNA, 20 bp, Artificial
  20-mer unique DNA sequence
cctggctcctctcctgcttg

SEQ ID NO: 3050 - DNA, 20 bp, Artificial
  20-mer unique DNA sequence
gcccgaaagcgcaggatcag

SEQ ID NO: 3051 - DNA, 20 bp, Artificial
  20-mer unique DNA sequence
ccattgaatttccggcgggg

SEQ ID NO: 3052 - DNA, 20 bp, Artificial
  20-mer unique DNA sequence
tccaacatctcccgcccagg

SEQ ID NO: 3053 - DNA, 20 bp, Artificial
  20-mer unique DNA sequence
gtgtatgggagagggcggta

SEQ ID NO: 3054 - DNA, 20 bp, Artificial
  20-mer unique DNA sequence
ggtgtagaggcgggtgcgga

SEQ ID NO: 3055 - DNA, 20 bp, Artificial
  20-mer unique DNA sequence
ggcggggcaagaagaggttg

SEQ ID NO: 3056 - DNA, 20 bp, Artificial
  20-mer unique DNA sequence
tcagggcgggagaatcgaat

SEQ ID NO: 3057 - DNA, 20 bp, Artificial
  20-mer unique DNA sequence
aatccgccccgcaaacagac

SEQ ID NO: 3058 - DNA, 20 bp, Artificial
  20-mer unique DNA sequence
tccgagcggtccacagaacg

SEQ ID NO: 3059 - DNA, 20 bp, Artificial
  20-mer unique DNA sequence
cgaactcaccacgctgccga

SEQ ID NO: 3060 - DNA, 20 bp, Artificial
  20-mer unique DNA sequence
ggaaaagctcagtgccgggg

SEQ ID NO: 3061 - DNA, 20 bp, Artificial
  20-mer unique DNA sequence
catcgcctcccacacccttg

SEQ ID NO: 3062 - DNA, 20 bp, Artificial
  20-mer unique DNA sequence
aatgtcccgccccctaaagc

SEQ ID NO: 3063 - DNA, 20 bp, Artificial
  20-mer unique DNA sequence
cgacgccacaacttccacga

SEQ ID NO: 3064 - DNA, 20 bp, Artificial
  20-mer unique DNA sequence
gtgtctaccccgctgccggt

SEQ ID NO: 3065 - DNA, 20 bp, Artificial
  20-mer unique DNA sequence
gagccggtgttcgggggtat

SEQ ID NO: 3066 - DNA, 20 bp, Artificial
  20-mer unique DNA sequence
aatttccgctatggccccgt

SEQ ID NO: 3067 - DNA, 20 bp, Artificial
  20-mer unique DNA sequence
agggccagagcgacgtagca

SEQ ID NO: 3068 - DNA, 20 bp, Artificial
  20-mer unique DNA sequence
cgaggcggacgtggtggtct

SEQ ID NO: 3069 - DNA, 20 bp, Artificial
  20-mer unique DNA sequence
catacaagcacgcgcctcga

SEQ ID NO: 3070 - DNA, 20 bp, Artificial
  20-mer unique DNA sequence
cttccactccgcatcacccc

SEQ ID NO: 3071 - DNA, 20 bp, Artificial
  20-mer unique DNA sequence
tacggatcgcggggaacaaa

SEQ ID NO: 3072 - DNA, 20 bp, Artificial
  20-mer unique DNA sequence
gggccgaggattgcatgagt

SEQ ID NO: 3073 - DNA, 20 bp, Artificial
  20-mer unique DNA sequence
acatcaacttgccgtcgggg

SEQ ID NO: 3074 - DNA, 20 bp, Artificial
  20-mer unique DNA sequence
aggtcgtgcgggtatggggg

SEQ ID NO: 3075 - DNA, 20 bp, Artificial
  20-mer unique DNA sequence
agttgcggcggttgatgagc

SEQ ID NO: 3076 - DNA, 20 bp, Artificial
  20-mer unique DNA sequence
tgacacgattcgtagggccg

SEQ ID NO: 3077 - DNA, 20 bp, Artificial
  20-mer unique DNA sequence
aataagagcgcgtcgccaca

SEQ ID NO: 3078 - DNA, 20 bp, Artificial
  20-mer unique DNA sequence
agcggttgtttggaggtggg

SEQ ID NO: 3079 - DNA, 20 bp, Artificial
  20-mer unique DNA sequence
ccaagagccccagaccgaag

SEQ ID NO: 3080 - DNA, 20 bp, Artificial
  20-mer unique DNA sequence
cgcacccctattccactgcc

SEQ ID NO: 3081 - DNA, 20 bp, Artificial
  20-mer unique DNA sequence
agccgacccaaacgagcaga

SEQ ID NO: 3082 - DNA, 20 bp, Artificial
  20-mer unique DNA sequence
ctgccaatagcccctgtcgg

SEQ ID NO: 3083 - DNA, 20 bp, Artificial
  20-mer unique DNA sequence
acgttgaagggggttggacg

SEQ ID NO: 3084 - DNA, 20 bp, Artificial
  20-mer unique DNA sequence
attccggcgtgacccacctg

SEQ ID NO: 3085 - DNA, 20 bp, Artificial
  20-mer unique DNA sequence
gacgagagacgtgggacgcg

SEQ ID NO: 3086 - DNA, 20 bp, Artificial
  20-mer unique DNA sequence
gcaggaggcatttaggccgg

SEQ ID NO: 3087 - DNA, 20 bp, Artificial
  20-mer unique DNA sequence
agatgtggccccgctgtgaa

SEQ ID NO: 3088 - DNA, 20 bp, Artificial
  20-mer unique DNA sequence
ggccttaatcgagcggggga

SEQ ID NO: 3089 - DNA, 20 bp, Artificial
  20-mer unique DNA sequence
tggccagcagacaccgggat

SEQ ID NO: 3090 - DNA, 20 bp, Artificial
  20-mer unique DNA sequence
gcgctaaatccccgctcccc

SEQ ID NO: 3091 - DNA, 20 bp, Artificial
  20-mer unique DNA sequence
gcttcgcgccatgtacctcc

SEQ ID NO: 3092 - DNA, 20 bp, Artificial
  20-mer unique DNA sequence
cctgggttcggggtgccttc

SEQ ID NO: 3093 - DNA, 20 bp, Artificial
  20-mer unique DNA sequence
tggcctttgtcgcgtgggtt

SEQ ID NO: 3094 - DNA, 20 bp, Artificial
  20-mer unique DNA sequence
ccgggaatacccccacaaaa

SEQ ID NO: 3095 - DNA, 20 bp, Artificial
  20-mer unique DNA sequence
ctcgaagccgtctttcccac

SEQ ID NO: 3096 - DNA, 20 bp, Artificial
  20-mer unique DNA sequence
agcctgcaaacatctccccc

SEQ ID NO: 3097 - DNA, 20 bp, Artificial
  20-mer unique DNA sequence
acgcgagctgggacgaacac

SEQ ID NO: 3098 - DNA, 20 bp, Artificial
  20-mer unique DNA sequence
accactcgatcccccgttcc

SEQ ID NO: 3099 - DNA, 20 bp, Artificial
  20-mer unique DNA sequence
tcagatgttgtccgcgtccg

SEQ ID NO: 3100 - DNA, 20 bp, Artificial
  20-mer unique DNA sequence
cacggggtcaaatggcggtc

SEQ ID NO: 3101 - DNA, 20 bp, Artificial
  20-mer unique DNA sequence
ctagggcaggcgttggcatc

SEQ ID NO: 3102 - DNA, 20 bp, Artificial
  20-mer unique DNA sequence
cggagtcgcatgacgaaagc

SEQ ID NO: 3103 - DNA, 20 bp, Artificial
  20-mer unique DNA sequence
agacgcactatcggcggagg

SEQ ID NO: 3104 - DNA, 20 bp, Artificial
  20-mer unique DNA sequence
gcgggcggagaaaaacgtca

SEQ ID NO: 3105 - DNA, 20 bp, Artificial
  20-mer unique DNA sequence
ccaccccgcctcagacgtta

SEQ ID NO: 3106 - DNA, 20 bp, Artificial
  20-mer unique DNA sequence
gcttgcggggatacgacggg

SEQ ID NO: 3107 - DNA, 20 bp, Artificial
  20-mer unique DNA sequence
tagggcagtttggacggcgg

SEQ ID NO: 3108 - DNA, 20 bp, Artificial
  20-mer unique DNA sequence
cgctattggccggggtcttt

SEQ ID NO: 3109 - DNA, 20 bp, Artificial
  20-mer unique DNA sequence
cgtgggcggaggttgaagac

SEQ ID NO: 3110 - DNA, 20 bp, Artificial
  20-mer unique DNA sequence
ctcgcagaaagggccacgtt

SEQ ID NO: 3111 - DNA, 20 bp, Artificial
  20-mer unique DNA sequence
ccccccaaagatagacgcca

SEQ ID NO: 3112 - DNA, 20 bp, Artificial
  20-mer unique DNA sequence
cctataaagccgcgggtcca

SEQ ID NO: 3113 - DNA, 20 bp, Artificial
  20-mer unique DNA sequence
tacacgtcgccttgccccct

SEQ ID NO: 3114 - DNA, 20 bp, Artificial
  20-mer unique DNA sequence
gcatggccgtgggttttgaa

SEQ ID NO: 3115 - DNA, 20 bp, Artificial
  20-mer unique DNA sequence
tggcgggtgcggtctggtac

SEQ ID NO: 3116 - DNA, 20 bp, Artificial
  20-mer unique DNA sequence
cgggggttatcgggacttga

SEQ ID NO: 3117 - DNA, 20 bp, Artificial
  20-mer unique DNA sequence
caaacggtcgcccaacaatg

SEQ ID NO: 3118 - DNA, 20 bp, Artificial
  20-mer unique DNA sequence
ccgcaccaggacaaaccaga

SEQ ID NO: 3119 - DNA, 20 bp, Artificial
  20-mer unique DNA sequence
ccagggggccaaggtacgta

SEQ ID NO: 3120 - DNA, 20 bp, Artificial
  20-mer unique DNA sequence
gagggcgggaagccgaacag

SEQ ID NO: 3121 - DNA, 20 bp, Artificial
  20-mer unique DNA sequence
gttgggtggggttgtctggg

SEQ ID NO: 3122 - DNA, 20 bp, Artificial
  20-mer unique DNA sequence
gccccttccaagtacccgct

SEQ ID NO: 3123 - DNA, 20 bp, Artificial
  20-mer unique DNA sequence
tccacacattaccctcggcg

SEQ ID NO: 3124 - DNA, 20 bp, Artificial
  20-mer unique DNA sequence
ttaggggtggagcggagcat

SEQ ID NO: 3125 - DNA, 20 bp, Artificial
  20-mer unique DNA sequence
gtggctgcggggtcggatac

SEQ ID NO: 3126 - DNA, 20 bp, Artificial
  20-mer unique DNA sequence
tgtagggtatgctggcgggg

SEQ ID NO: 3127 - DNA, 20 bp, Artificial
  20-mer unique DNA sequence
ctgccgacccaaccctctca

SEQ ID NO: 3128 - DNA, 20 bp, Artificial
  20-mer unique DNA sequence
gcagggtttgatagggcggc

SEQ ID NO: 3129 - DNA, 20 bp, Artificial
  20-mer unique DNA sequence
agtgcggaactcgattgtga

SEQ ID NO: 3130 - DNA, 20 bp, Artificial
  20-mer unique DNA sequence
gcgccgtgtgtatagcccaa

SEQ ID NO: 3131 - DNA, 20 bp, Artificial
  20-mer unique DNA sequence
ttgtggggcggctagtgctt

SEQ ID NO: 3132 - DNA, 20 bp, Artificial
  20-mer unique DNA sequence
gcgaggcattgaggcgagtc

SEQ ID NO: 3133 - DNA, 20 bp, Artificial
  20-mer unique DNA sequence
tgattgggggagcctgtgtg

SEQ ID NO: 3134 - DNA, 20 bp, Artificial
  20-mer unique DNA sequence
aggtgggggcaggtaagcgg

SEQ ID NO: 3135 - DNA, 20 bp, Artificial
  20-mer unique DNA sequence
agtgagggggctggcgaagg

SEQ ID NO: 3136 - DNA, 20 bp, Artificial
  20-mer unique DNA sequence
gggttgtggataggcggtgc

SEQ ID NO: 3137 - DNA, 20 bp, Artificial
  20-mer unique DNA sequence
ggaggttgagggcgggggta

SEQ ID NO: 3138 - DNA, 20 bp, Artificial
  20-mer unique DNA sequence
tgggaggtcaagagcggcaa

SEQ ID NO: 3139 - DNA, 20 bp, Artificial
  20-mer unique DNA sequence
cgccggggtgctacctcagt

SEQ ID NO: 3140 - DNA, 20 bp, Artificial
  20-mer unique DNA sequence
gaactcatgagggagggcgg

SEQ ID NO: 3141 - DNA, 20 bp, Artificial
  20-mer unique DNA sequence
gccccgccgatcgagtctct

SEQ ID NO: 3142 - DNA, 20 bp, Artificial
  20-mer unique DNA sequence
aggtggcagggaattgtggc

SEQ ID NO: 3143 - DNA, 20 bp, Artificial
  20-mer unique DNA sequence
tagcccctccggttccttgc

SEQ ID NO: 3144 - DNA, 20 bp, Artificial
  20-mer unique DNA sequence
tgccaccaacgaagcgaatc

SEQ ID NO: 3145 - DNA, 20 bp, Artificial
  20-mer unique DNA sequence
ccgtattccgcgacccctaa

SEQ ID NO: 3146 - DNA, 20 bp, Artificial
  20-mer unique DNA sequence
aggctattgttgggcggggg

SEQ ID NO: 3147 - DNA, 20 bp, Artificial
  20-mer unique DNA sequence
gggaaaatgggttaggggcg

SEQ ID NO: 3148 - DNA, 20 bp, Artificial
  20-mer unique DNA sequence
atacccaactgcccccccac

SEQ ID NO: 3149 - DNA, 20 bp, Artificial
  20-mer unique DNA sequence
gcggcaagttaggagcggaa

SEQ ID NO: 3150 - DNA, 20 bp, Artificial
  20-mer unique DNA sequence
aaagccgcatacccaccacg

SEQ ID NO: 3151 - DNA, 20 bp, Artificial
  20-mer unique DNA sequence
ccagcaacagacgcagccaa

SEQ ID NO: 3152 - DNA, 20 bp, Artificial
  20-mer unique DNA sequence
tggggagccagagaagcggc

SEQ ID NO: 3153 - DNA, 20 bp, Artificial
  20-mer unique DNA sequence
accacgttacctcccgcccc

SEQ ID NO: 3154 - DNA, 20 bp, Artificial
  20-mer unique DNA sequence
tgagccttccgacaattgcg

SEQ ID NO: 3155 - DNA, 20 bp, Artificial
  20-mer unique DNA sequence
ccctgcgccacacatcaagc

SEQ ID NO: 3156 - DNA, 20 bp, Artificial
  20-mer unique DNA sequence
ccagcaagccctcaaaacgc

SEQ ID NO: 3157 - DNA, 20 bp, Artificial
  20-mer unique DNA sequence
tgctcgcttcgttctgcctg

SEQ ID NO: 3158 - DNA, 20 bp, Artificial
  20-mer unique DNA sequence
agatcgccgcaagccaagga

SEQ ID NO: 3159 - DNA, 20 bp, Artificial
  20-mer unique DNA sequence
tgtgttcactccgaggctgc

SEQ ID NO: 3160 - DNA, 20 bp, Artificial
  20-mer unique DNA sequence
gaatgggggcgggctttcaa

SEQ ID NO: 3161 - DNA, 20 bp, Artificial
  20-mer unique DNA sequence
gtcgtggggggagataggcg

SEQ ID NO: 3162 - DNA, 20 bp, Artificial
  20-mer unique DNA sequence
acatgcccatcgcggaccga

SEQ ID NO: 3163 - DNA, 20 bp, Artificial
  20-mer unique DNA sequence
ggggcgttactccgagcagg

SEQ ID NO: 3164 - DNA, 20 bp, Artificial
  20-mer unique DNA sequence
ttggacggggatttacggcg

SEQ ID NO: 3165 - DNA, 20 bp, Artificial
  20-mer unique DNA sequence
ggtcagaatgggtcgcggac

SEQ ID NO: 3166 - DNA, 20 bp, Artificial
  20-mer unique DNA sequence
cggacggagaggcgggtaca

SEQ ID NO: 3167 - DNA, 20 bp, Artificial
  20-mer unique DNA sequence
ttccaaggcgcgggtatcaa

SEQ ID NO: 3168 - DNA, 20 bp, Artificial
  20-mer unique DNA sequence
ctgaccctcgcccggaatgt

SEQ ID NO: 3169 - DNA, 20 bp, Artificial
  20-mer unique DNA sequence
tccattagtgctgcgtcggg

SEQ ID NO: 3170 - DNA, 20 bp, Artificial
  20-mer unique DNA sequence
cgttgatcaggcagggcaag

SEQ ID NO: 3171 - DNA, 20 bp, Artificial
  20-mer unique DNA sequence
cgcgcttcacgtacgtcgtt

SEQ ID NO: 3172 - DNA, 20 bp, Artificial
  20-mer unique DNA sequence
cgcgcgaccccaataaaccc

SEQ ID NO: 3173 - DNA, 20 bp, Artificial
  20-mer unique DNA sequence
cgtttggaaggggtgcgtca

SEQ ID NO: 3174 - DNA, 20 bp, Artificial
  20-mer unique DNA sequence
cgagttggggagcccgtgtc

SEQ ID NO: 3175 - DNA, 20 bp, Artificial
  20-mer unique DNA sequence
caggttcatggcgccgtctc

SEQ ID NO: 3176 - DNA, 20 bp, Artificial
  20-mer unique DNA sequence
ttatgcgacgggcggacgat

SEQ ID NO: 3177 - DNA, 20 bp, Artificial
  20-mer unique DNA sequence
gcattgatcgggcagacggc

SEQ ID NO: 3178 - DNA, 20 bp, Artificial
  20-mer unique DNA sequence
tagggggcggaggacggtat

SEQ ID NO: 3179 - DNA, 20 bp, Artificial
  20-mer unique DNA sequence
aatccccgtcccattccagc

SEQ ID NO: 3180 - DNA, 20 bp, Artificial
  20-mer unique DNA sequence
gcacaacggggaaatggagg

SEQ ID NO: 3181 - DNA, 20 bp, Artificial
  20-mer unique DNA sequence
tcgattcctgtcctcccggg

SEQ ID NO: 3182 - DNA, 20 bp, Artificial
  20-mer unique DNA sequence
ccccctccgtcttcgcctta

SEQ ID NO: 3183 - DNA, 20 bp, Artificial
  20-mer unique DNA sequence
tgacgggcattgttggggac

SEQ ID NO: 3184 - DNA, 20 bp, Artificial
  20-mer unique DNA sequence
gcggcggtagagccgttatt

SEQ ID NO: 3185 - DNA, 20 bp, Artificial
  20-mer unique DNA sequence
cgcggtgggagaagtgggta

SEQ ID NO: 3186 - DNA, 20 bp, Artificial
  20-mer unique DNA sequence
gggaacgccagtagccggat

SEQ ID NO: 3187 - DNA, 20 bp, Artificial
  20-mer unique DNA sequence
gtcggttatgggtgggtcgc

SEQ ID NO: 3188 - DNA, 20 bp, Artificial
  20-mer unique DNA sequence
gggtgtgactggcggggaaa

SEQ ID NO: 3189 - DNA, 20 bp, Artificial
  20-mer unique DNA sequence
tggagcgtatggagggcagg

SEQ ID NO: 3190 - DNA, 20 bp, Artificial
  20-mer unique DNA sequence
tcacccagcccgcagttaca

SEQ ID NO: 3191 - DNA, 20 bp, Artificial
  20-mer unique DNA sequence
ccggaatgaacgtaggcgcc

SEQ ID NO: 3192 - DNA, 20 bp, Artificial
  20-mer unique DNA sequence
agcccaacagccgaccagtc

SEQ ID NO: 3193 - DNA, 20 bp, Artificial
  20-mer unique DNA sequence
gagttgggaagcacgacgcc

SEQ ID NO: 3194 - DNA, 20 bp, Artificial
  20-mer unique DNA sequence
ggcctgctgaacgaaccgat

SEQ ID NO: 3195 - DNA, 20 bp, Artificial
  20-mer unique DNA sequence
tcgggccaacatgatccagc

SEQ ID NO: 3196 - DNA, 20 bp, Artificial
  20-mer unique DNA sequence
accgggtgtggagctgcatg

SEQ ID NO: 3197 - DNA, 20 bp, Artificial
  20-mer unique DNA sequence
agaccgtagcgggaaggggt

SEQ ID NO: 3198 - DNA, 20 bp, Artificial
  20-mer unique DNA sequence
gaggagactgtggtgggggc

SEQ ID NO: 3199 - DNA, 20 bp, Artificial
  20-mer unique DNA sequence
acgttacgtactacgcggct

SEQ ID NO: 3200 - DNA, 20 bp, Artificial
  20-mer unique DNA sequence
cctcgcgtccgatttgtgag

SEQ ID NO: 3201 - DNA, 20 bp, Artificial
  20-mer unique DNA sequence
cgcgtcagctacccccgata

SEQ ID NO: 3202 - DNA, 20 bp, Artificial
  20-mer unique DNA sequence
ttccgcgcagtttgggtctg

SEQ ID NO: 3203 - DNA, 20 bp, Artificial
  20-mer unique DNA sequence
acaagcgttcccggactgag

SEQ ID NO: 3204 - DNA, 20 bp, Artificial
  20-mer unique DNA sequence
gtcctcttggcccccgtctc

SEQ ID NO: 3205 - DNA, 20 bp, Artificial
  20-mer unique DNA sequence
attcggcttgttggctcccc

SEQ ID NO: 3206 - DNA, 20 bp, Artificial
  20-mer unique DNA sequence
ccgggggctgagacacaatg

SEQ ID NO: 3207 - DNA, 20 bp, Artificial
  20-mer unique DNA sequence
cttgtgggggcgaaccgcta

SEQ ID NO: 3208 - DNA, 20 bp, Artificial
  20-mer unique DNA sequence
taactgcgcaaccgggaagg

SEQ ID NO: 3209 - DNA, 20 bp, Artificial
  20-mer unique DNA sequence
gctgttctcgtcgtcgcctg

SEQ ID NO: 3210 - DNA, 20 bp, Artificial
  20-mer unique DNA sequence
tgactgcaagcggcccgata

SEQ ID NO: 3211 - DNA, 20 bp, Artificial
  20-mer unique DNA sequence
agctttgcggctacgggcag

SEQ ID NO: 3212 - DNA, 20 bp, Artificial
  20-mer unique DNA sequence
attggattgcggcccttgag

SEQ ID NO: 3213 - DNA, 20 bp, Artificial
  20-mer unique DNA sequence
gcgctcggatatgggtatcg

SEQ ID NO: 3214 - DNA, 20 bp, Artificial
  20-mer unique DNA sequence
agcggtgcgaagggtgaagg

SEQ ID NO: 3215 - DNA, 20 bp, Artificial
  20-mer unique DNA sequence
aactgggcgtaggacagggc

SEQ ID NO: 3216 - DNA, 20 bp, Artificial
  20-mer unique DNA sequence
caccccgccctgtaatcgct

SEQ ID NO: 3217 - DNA, 20 bp, Artificial
  20-mer unique DNA sequence
cagaaaccgcccagcaagcg

SEQ ID NO: 3218 - DNA, 20 bp, Artificial
  20-mer unique DNA sequence
ggctcccgcaaaccccattg

SEQ ID NO: 3219 - DNA, 20 bp, Artificial
  20-mer unique DNA sequence
cccagccctgcatcacacac

SEQ ID NO: 3220 - DNA, 20 bp, Artificial
  20-mer unique DNA sequence
tgcccgtgtaactctccccg

SEQ ID NO: 3221 - DNA, 20 bp, Artificial
  20-mer unique DNA sequence
tccctattccccgtgccctg

SEQ ID NO: 3222 - DNA, 20 bp, Artificial
  20-mer unique DNA sequence
gcagaaccctcccgccagta

SEQ ID NO: 3223 - DNA, 20 bp, Artificial
  20-mer unique DNA sequence
ccgtccgtccatcttctgcc

SEQ ID NO: 3224 - DNA, 20 bp, Artificial
  20-mer unique DNA sequence
acatttaaccccggacccgc

SEQ ID NO: 3225 - DNA, 20 bp, Artificial
  20-mer unique DNA sequence
aagtcgcccgagagttaggc

SEQ ID NO: 3226 - DNA, 20 bp, Artificial
  20-mer unique DNA sequence
acgggattcggtctgtcgtt

SEQ ID NO: 3227 - DNA, 20 bp, Artificial
  20-mer unique DNA sequence
cgtttggttgggttgcgtcg

SEQ ID NO: 3228 - DNA, 20 bp, Artificial
  20-mer unique DNA sequence
acagcgtcctcccagcccag

SEQ ID NO: 3229 - DNA, 20 bp, Artificial
  20-mer unique DNA sequence
aggaaagcaaaaccccccga

SEQ ID NO: 3230 - DNA, 20 bp, Artificial
  20-mer unique DNA sequence
tgcttttaggtcgtggcggg

SEQ ID NO: 3231 - DNA, 20 bp, Artificial
  20-mer unique DNA sequence
gcggttggcgggtgtgtagg

SEQ ID NO: 3232 - DNA, 20 bp, Artificial
  20-mer unique DNA sequence
acggcaggcggctctaacac

SEQ ID NO: 3233 - DNA, 20 bp, Artificial
  20-mer unique DNA sequence
cgcactttgcatgaacgccg

SEQ ID NO: 3234 - DNA, 20 bp, Artificial
  20-mer unique DNA sequence
ggacgtttgatcggggcaga

SEQ ID NO: 3235 - DNA, 20 bp, Artificial
  20-mer unique DNA sequence
gcggagcgatatggggaaca

SEQ ID NO: 3236 - DNA, 20 bp, Artificial
  20-mer unique DNA sequence
gtgagggaccgtatggcaga

SEQ ID NO: 3237 - DNA, 20 bp, Artificial
  20-mer unique DNA sequence
cgggggggtctgccttgtat

SEQ ID NO: 3238 - DNA, 20 bp, Artificial
  20-mer unique DNA sequence
cgcccctcctcctctgccta

SEQ ID NO: 3239 - DNA, 20 bp, Artificial
  20-mer unique DNA sequence
cattaacgtctggccgcgcc

SEQ ID NO: 3240 - DNA, 20 bp, Artificial
  20-mer unique DNA sequence
cctgtagcgcccggtgttcg

SEQ ID NO: 3241 - DNA, 20 bp, Artificial
  20-mer unique DNA sequence
tccctggcagctctgacgta

SEQ ID NO: 3242 - DNA, 20 bp, Artificial
  20-mer unique DNA sequence
tgaccgccacctcgacgttg

SEQ ID NO: 3243 - DNA, 20 bp, Artificial
  20-mer unique DNA sequence
cgtatgagcccgacgtcccc

SEQ ID NO: 3244 - DNA, 20 bp, Artificial
  20-mer unique DNA sequence
ccgtccatccgccttatcca

SEQ ID NO: 3245 - DNA, 20 bp, Artificial
  20-mer unique DNA sequence
attcgtcgggtgtcgtcggg

SEQ ID NO: 3246 - DNA, 20 bp, Artificial
  20-mer unique DNA sequence
tcgcgtcgttccgtttggta

SEQ ID NO: 3247 - DNA, 20 bp, Artificial
  20-mer unique DNA sequence
ctgcccgtattttcctcccg

SEQ ID NO: 3248 - DNA, 20 bp, Artificial
  20-mer unique DNA sequence
atcctgttagccccctgccc

SEQ ID NO: 3249 - DNA, 20 bp, Artificial
  20-mer unique DNA sequence
aatcttcgtcttgcgcggct

SEQ ID NO: 3250 - DNA, 20 bp, Artificial
  20-mer unique DNA sequence
tgcccacctgtttcaccacg

SEQ ID NO: 3251 - DNA, 20 bp, Artificial
  20-mer unique DNA sequence
agcggttcgggtggagtgat

SEQ ID NO: 3252 - DNA, 20 bp, Artificial
  20-mer unique DNA sequence
tcaactctgcgggctcctcg

SEQ ID NO: 3253 - DNA, 20 bp, Artificial
  20-mer unique DNA sequence
tgcatgaccgcccagtttgg

SEQ ID NO: 3254 - DNA, 20 bp, Artificial
  20-mer unique DNA sequence
aaccacccgagcaccagcct

SEQ ID NO: 3255 - DNA, 20 bp, Artificial
  20-mer unique DNA sequence
ttacgggtgggcgtgtatgc

SEQ ID NO: 3256 - DNA, 20 bp, Artificial
  20-mer unique DNA sequence
tgattggagcgcgtctggga

SEQ ID NO: 3257 - DNA, 20 bp, Artificial
  20-mer unique DNA sequence
cggctttcgcttctggggtt

SEQ ID NO: 3258 - DNA, 20 bp, Artificial
  20-mer unique DNA sequence
gacccacccgcatcacaacc

SEQ ID NO: 3259 - DNA, 20 bp, Artificial
  20-mer unique DNA sequence
acagtcctgccgtctgcgaa

SEQ ID NO: 3260 - DNA, 20 bp, Artificial
  20-mer unique DNA sequence
ggggcaagaccaggatgggg

SEQ ID NO: 3261 - DNA, 20 bp, Artificial
  20-mer unique DNA sequence
ctctgggcttgggcctggta

SEQ ID NO: 3262 - DNA, 20 bp, Artificial
  20-mer unique DNA sequence
accgtcatcaccaacaccgc

SEQ ID NO: 3263 - DNA, 20 bp, Artificial
  20-mer unique DNA sequence
tcgagggcgcgcttaacact

SEQ ID NO: 3264 - DNA, 20 bp, Artificial
  20-mer unique DNA sequence
attatggcggaggcgggggt

SEQ ID NO: 3265 - DNA, 20 bp, Artificial
  20-mer unique DNA sequence
cgaacgaagcattccagggc

SEQ ID NO: 3266 - DNA, 20 bp, Artificial
  20-mer unique DNA sequence
ccgttaccgctttgccctgg

SEQ ID NO: 3267 - DNA, 20 bp, Artificial
  20-mer unique DNA sequence
gggggagtcgcggtgcttgt

SEQ ID NO: 3268 - DNA, 20 bp, Artificial
  20-mer unique DNA sequence
ccctgcccttcacctcatcg

SEQ ID NO: 3269 - DNA, 20 bp, Artificial
  20-mer unique DNA sequence
ggcaggggcttacggtcggt

SEQ ID NO: 3270 - DNA, 20 bp, Artificial
  20-mer unique DNA sequence
tcgccccgtaccctaccacg

SEQ ID NO: 3271 - DNA, 20 bp, Artificial
  20-mer unique DNA sequence
gattaaagcgacgcgaggcc

SEQ ID NO: 3272 - DNA, 20 bp, Artificial
  20-mer unique DNA sequence
tagggggcgggcttgtgtcc

SEQ ID NO: 3273 - DNA, 20 bp, Artificial
  20-mer unique DNA sequence
cagaaggatccgggcgcaac

SEQ ID NO: 3274 - DNA, 20 bp, Artificial
  20-mer unique DNA sequence
aagacatgtggccaaccccc

SEQ ID NO: 3275 - DNA, 20 bp, Artificial
  20-mer unique DNA sequence
ccccaacagcggcatagatg

SEQ ID NO: 3276 - DNA, 20 bp, Artificial
  20-mer unique DNA sequence
atttcccgagcaccccttcc

SEQ ID NO: 3277 - DNA, 20 bp, Artificial
  20-mer unique DNA sequence
tcctcctagcccgcaactcg

SEQ ID NO: 3278 - DNA, 20 bp, Artificial
  20-mer unique DNA sequence
tttgtggcgggaactatgcg

SEQ ID NO: 3279 - DNA, 20 bp, Artificial
  20-mer unique DNA sequence
tctcggtgcgggggtgtttc

SEQ ID NO: 3280 - DNA, 20 bp, Artificial
  20-mer unique DNA sequence
cagggggtgtcatgctgggg

SEQ ID NO: 3281 - DNA, 20 bp, Artificial
  20-mer unique DNA sequence
tgcttgtgggaccctgcgct

SEQ ID NO: 3282 - DNA, 20 bp, Artificial
  20-mer unique DNA sequence
gcggcgaatgaagtgaggct

SEQ ID NO: 3283 - DNA, 20 bp, Artificial
  20-mer unique DNA sequence
ggggactggtgatggcgatg

SEQ ID NO: 3284 - DNA, 20 bp, Artificial
  20-mer unique DNA sequence
cggcgtcggtgaggaaggat

SEQ ID NO: 3285 - DNA, 20 bp, Artificial
  20-mer unique DNA sequence
agtcgtctagaccgtcgggt

SEQ ID NO: 3286 - DNA, 20 bp, Artificial
  20-mer unique DNA sequence
cgttgatccgccgcttatgc

SEQ ID NO: 3287 - DNA, 20 bp, Artificial
  20-mer unique DNA sequence
cgctgctcctgccttcgatg

SEQ ID NO: 3288 - DNA, 20 bp, Artificial
  20-mer unique DNA sequence
cttttggcaggggaccggag

SEQ ID NO: 3289 - DNA, 20 bp, Artificial
  20-mer unique DNA sequence
atgctttggagggaacggga

SEQ ID NO: 3290 - DNA, 20 bp, Artificial
  20-mer unique DNA sequence
ccaatcggcgtcaatgcttg

SEQ ID NO: 3291 - DNA, 20 bp, Artificial
  20-mer unique DNA sequence
aggggctgggacgggggaca

SEQ ID NO: 3292 - DNA, 20 bp, Artificial
  20-mer unique DNA sequence
cgagaaccaagcgggtggga

SEQ ID NO: 3293 - DNA, 20 bp, Artificial
  20-mer unique DNA sequence
ggcggctgatatgtcgggac

SEQ ID NO: 3294 - DNA, 20 bp, Artificial
  20-mer unique DNA sequence
cccgatgtagcgccgagttc

SEQ ID NO: 3295 - DNA, 20 bp, Artificial
  20-mer unique DNA sequence
agggctgcggggaatatcgt

SEQ ID NO: 3296 - DNA, 20 bp, Artificial
  20-mer unique DNA sequence
tgtagacaacggccgagccc

SEQ ID NO: 3297 - DNA, 20 bp, Artificial
  20-mer unique DNA sequence
tttgggcggaaagccacttg

SEQ ID NO: 3298 - DNA, 20 bp, Artificial
  20-mer unique DNA sequence
cgtgccccactcgtctcctg

SEQ ID NO: 3299 - DNA, 20 bp, Artificial
  20-mer unique DNA sequence
tgttccgttttcggttggca

SEQ ID NO: 3300 - DNA, 20 bp, Artificial
  20-mer unique DNA sequence
aggcctccagcgaattagcg

SEQ ID NO: 3301 - DNA, 20 bp, Artificial
  20-mer unique DNA sequence
ctccccagctgtcgtccccg

SEQ ID NO: 3302 - DNA, 20 bp, Artificial
  20-mer unique DNA sequence
ttccccctattcgcacacgg

SEQ ID NO: 3303 - DNA, 20 bp, Artificial
  20-mer unique DNA sequence
ttcggagttggatgggcggt

SEQ ID NO: 3304 - DNA, 20 bp, Artificial
  20-mer unique DNA sequence
atcggcaaggtcggtcaggc

SEQ ID NO: 3305 - DNA, 20 bp, Artificial
  20-mer unique DNA sequence
acagggagggccgggtaact

SEQ ID NO: 3306 - DNA, 20 bp, Artificial
  20-mer unique DNA sequence
gcccctaagcctccatcccg

SEQ ID NO: 3307 - DNA, 20 bp, Artificial
  20-mer unique DNA sequence
taacccaggctctcgtgcca

SEQ ID NO: 3308 - DNA, 20 bp, Artificial
  20-mer unique DNA sequence
gggcgtggtcgggatggtat

SEQ ID NO: 3309 - DNA, 20 bp, Artificial
  20-mer unique DNA sequence
ttagttttgggttgcggggc

SEQ ID NO: 3310 - DNA, 20 bp, Artificial
  20-mer unique DNA sequence
caactagcggggtggctcga

SEQ ID NO: 3311 - DNA, 20 bp, Artificial
  20-mer unique DNA sequence
actcgcgggtactcacgctt

SEQ ID NO: 3312 - DNA, 20 bp, Artificial
  20-mer unique DNA sequence
tgcaaatgagccccacgtcg

SEQ ID NO: 3313 - DNA, 20 bp, Artificial
  20-mer unique DNA sequence
tgcgttgatggggaggttga

SEQ ID NO: 3314 - DNA, 20 bp, Artificial
  20-mer unique DNA sequence
tcaccgtcagtccccgccac

SEQ ID NO: 3315 - DNA, 20 bp, Artificial
  20-mer unique DNA sequence
ggggtgtggcggacgaaatt

SEQ ID NO: 3316 - DNA, 20 bp, Artificial
  20-mer unique DNA sequence
acgggtctggtctttggggg

SEQ ID NO: 3317 - DNA, 20 bp, Artificial
  20-mer unique DNA sequence
cgctaacatgggctcgggat

SEQ ID NO: 3318 - DNA, 20 bp, Artificial
  20-mer unique DNA sequence
aagccaaggagggggtgcca

SEQ ID NO: 3319 - DNA, 20 bp, Artificial
  20-mer unique DNA sequence
gcccatcgatgaccctccag

SEQ ID NO: 3320 - DNA, 20 bp, Artificial
  20-mer unique DNA sequence
cgaggggacatgtgggggta

SEQ ID NO: 3321 - DNA, 20 bp, Artificial
  20-mer unique DNA sequence
ggacgagtagggggagcgcg

SEQ ID NO: 3322 - DNA, 20 bp, Artificial
  20-mer unique DNA sequence
gtcatcttccgtgggccctc

SEQ ID NO: 3323 - DNA, 20 bp, Artificial
  20-mer unique DNA sequence
acccacccgcccccgttaat

SEQ ID NO: 3324 - DNA, 20 bp, Artificial
  20-mer unique DNA sequence
ggaaccgcagaacacgtgac

SEQ ID NO: 3325 - DNA, 20 bp, Artificial
  20-mer unique DNA sequence
tggagggctaggaggcgtgg

SEQ ID NO: 3326 - DNA, 20 bp, Artificial
  20-mer unique DNA sequence
ccgttgcaaccgatttggga

SEQ ID NO: 3327 - DNA, 20 bp, Artificial
  20-mer unique DNA sequence
ggctgaagtcgatggcggaa

SEQ ID NO: 3328 - DNA, 20 bp, Artificial
  20-mer unique DNA sequence
agcacgctattacccgccga

SEQ ID NO: 3329 - DNA, 20 bp, Artificial
  20-mer unique DNA sequence
tatcctagcacgcgggggtt

SEQ ID NO: 3330 - DNA, 20 bp, Artificial
  20-mer unique DNA sequence
gcaagccggccaatcagtcc

SEQ ID NO: 3331 - DNA, 20 bp, Artificial
  20-mer unique DNA sequence
tcgtcgccgtgcctcatttc

SEQ ID NO: 3332 - DNA, 20 bp, Artificial
  20-mer unique DNA sequence
cccgcgaggtgttcctaacc

SEQ ID NO: 3333 - DNA, 20 bp, Artificial
  20-mer unique DNA sequence
cattcactaccgcccccagg

SEQ ID NO: 3334 - DNA, 20 bp, Artificial
  20-mer unique DNA sequence
gagcggcgaacgttgcaaac

SEQ ID NO: 3335 - DNA, 20 bp, Artificial
  20-mer unique DNA sequence
ggacggtgggatcttgcgat

SEQ ID NO: 3336 - DNA, 20 bp, Artificial
  20-mer unique DNA sequence
tgcaataccggccgaaagga

SEQ ID NO: 3337 - DNA, 20 bp, Artificial
  20-mer unique DNA sequence
cccggggttgcgaaagttga

SEQ ID NO: 3338 - DNA, 20 bp, Artificial
  20-mer unique DNA sequence
cccgaactgacaaagggccg

SEQ ID NO: 3339 - DNA, 20 bp, Artificial
  20-mer unique DNA sequence
gtactaggcgcccggttggc

SEQ ID NO: 3340 - DNA, 20 bp, Artificial
  20-mer unique DNA sequence
aacgcggaaatttggggctc

SEQ ID NO: 3341 - DNA, 20 bp, Artificial
  20-mer unique DNA sequence
tgtgtggggtatccgaggcg

SEQ ID NO: 3342 - DNA, 20 bp, Artificial
  20-mer unique DNA sequence
tcacgccggtaagcgacagt

SEQ ID NO: 3343 - DNA, 20 bp, Artificial
  20-mer unique DNA sequence
acgcctatacccccatcgcc

SEQ ID NO: 3344 - DNA, 20 bp, Artificial
  20-mer unique DNA sequence
tgcgtccccttcagctcgtc

SEQ ID NO: 3345 - DNA, 20 bp, Artificial
  20-mer unique DNA sequence
gtccaacagggccgaagcat

SEQ ID NO: 3346 - DNA, 20 bp, Artificial
  20-mer unique DNA sequence
ttacgtagtgcatgccgggg

SEQ ID NO: 3347 - DNA, 20 bp, Artificial
  20-mer unique DNA sequence
tccacattcgcaaagccacg

SEQ ID NO: 3348 - DNA, 20 bp, Artificial
  20-mer unique DNA sequence
aagagcgcagagcgagccag

SEQ ID NO: 3349 - DNA, 20 bp, Artificial
  20-mer unique DNA sequence
tgccgcgttaaattcccatg

SEQ ID NO: 3350 - DNA, 20 bp, Artificial
  20-mer unique DNA sequence
caggcacgaaaccgcaagga

SEQ ID NO: 3351 - DNA, 20 bp, Artificial
  20-mer unique DNA sequence
aggaaaaggccggatcgtca

SEQ ID NO: 3352 - DNA, 20 bp, Artificial
  20-mer unique DNA sequence
aggacgcaccaaccgacgat

SEQ ID NO: 3353 - DNA, 20 bp, Artificial
  20-mer unique DNA sequence
tacaacccatcgcaagcgca

SEQ ID NO: 3354 - DNA, 20 bp, Artificial
  20-mer unique DNA sequence
gcgatgtttgagatgggcgg

SEQ ID NO: 3355 - DNA, 20 bp, Artificial
  20-mer unique DNA sequence
gagagagcgactgggggtgg

SEQ ID NO: 3356 - DNA, 20 bp, Artificial
  20-mer unique DNA sequence
cggcttccagcaaactccca

SEQ ID NO: 3357 - DNA, 20 bp, Artificial
  20-mer unique DNA sequence
aaacctagggggaatgcggg

SEQ ID NO: 3358 - DNA, 20 bp, Artificial
  20-mer unique DNA sequence
ttgcgccttgacgtacccgg

SEQ ID NO: 3359 - DNA, 20 bp, Artificial
  20-mer unique DNA sequence
tccttggtacggggtggctc

SEQ ID NO: 3360 - DNA, 20 bp, Artificial
  20-mer unique DNA sequence
tgggaacggcgggattgtag

SEQ ID NO: 3361 - DNA, 20 bp, Artificial
  20-mer unique DNA sequence
acactacccgcacgcaaccc

SEQ ID NO: 3362 - DNA, 20 bp, Artificial
  20-mer unique DNA sequence
gcgtgatcaaggaggcggtg

SEQ ID NO: 3363 - DNA, 20 bp, Artificial
  20-mer unique DNA sequence
gccgtgaaggattgggaggt

SEQ ID NO: 3364 - DNA, 20 bp, Artificial
  20-mer unique DNA sequence
gtggtgggggagatgagggg

SEQ ID NO: 3365 - DNA, 20 bp, Artificial
  20-mer unique DNA sequence
ccgtcaacaatcacgcagca

SEQ ID NO: 3366 - DNA, 20 bp, Artificial
  20-mer unique DNA sequence
tcgttcgccccccatcctag

SEQ ID NO: 3367 - DNA, 20 bp, Artificial
  20-mer unique DNA sequence
acgcctgccattccccattt

SEQ ID NO: 3368 - DNA, 20 bp, Artificial
  20-mer unique DNA sequence
cccgcaagcaaccagacacg

SEQ ID NO: 3369 - DNA, 20 bp, Artificial
  20-mer unique DNA sequence
acacacccactccgcagcaa

SEQ ID NO: 3370 - DNA, 20 bp, Artificial
  20-mer unique DNA sequence
catcccccgatcagtttggc

SEQ ID NO: 3371 - DNA, 20 bp, Artificial
  20-mer unique DNA sequence
attccgaccccgagccgtta

SEQ ID NO: 3372 - DNA, 20 bp, Artificial
  20-mer unique DNA sequence
caaacccgcggagacaggaa

SEQ ID NO: 3373 - DNA, 20 bp, Artificial
  20-mer unique DNA sequence
tgggcgggtacatgggagat

SEQ ID NO: 3374 - DNA, 20 bp, Artificial
  20-mer unique DNA sequence
tggagcgagcggagacggag

SEQ ID NO: 3375 - DNA, 20 bp, Artificial
  20-mer unique DNA sequence
ccgcccaccgtaaagcaatc

SEQ ID NO: 3376 - DNA, 20 bp, Artificial
  20-mer unique DNA sequence
gcaagccagccacatcacca

SEQ ID NO: 3377 - DNA, 20 bp, Artificial
  20-mer unique DNA sequence
tcggtggtacacgtatggcg

SEQ ID NO: 3378 - DNA, 20 bp, Artificial
  20-mer unique DNA sequence
caggcgagggacgttggggt

SEQ ID NO: 3379 - DNA, 20 bp, Artificial
  20-mer unique DNA sequence
tcggtgcgcaggcttttgag

SEQ ID NO: 3380 - DNA, 20 bp, Artificial
  20-mer unique DNA sequence
aagtagggctcggtcgggga

SEQ ID NO: 3381 - DNA, 20 bp, Artificial
  20-mer unique DNA sequence
cgcgtggatggggtcaaaag

SEQ ID NO: 3382 - DNA, 20 bp, Artificial
  20-mer unique DNA sequence
agggatcgggtgctagggct

SEQ ID NO: 3383 - DNA, 20 bp, Artificial
  20-mer unique DNA sequence
gggccgtggtcgtgagtgtg

SEQ ID NO: 3384 - DNA, 20 bp, Artificial
  20-mer unique DNA sequence
caccgggtccgttcgaatct

SEQ ID NO: 3385 - DNA, 20 bp, Artificial
  20-mer unique DNA sequence
taggagcccggtcactgcta

SEQ ID NO: 3386 - DNA, 20 bp, Artificial
  20-mer unique DNA sequence
caggcaaggcgggacgatta

SEQ ID NO: 3387 - DNA, 20 bp, Artificial
  20-mer unique DNA sequence
gtgtccccgacgataagacg

SEQ ID NO: 3388 - DNA, 20 bp, Artificial
  20-mer unique DNA sequence
tgaaataccggcagccacgc

SEQ ID NO: 3389 - DNA, 20 bp, Artificial
  20-mer unique DNA sequence
tgtgcggtcgctgtggctgg

SEQ ID NO: 3390 - DNA, 20 bp, Artificial
  20-mer unique DNA sequence
tttgcttctttgggcgggca

SEQ ID NO: 3391 - DNA, 20 bp, Artificial
  20-mer unique DNA sequence
gggcttcgggtgctggttta

SEQ ID NO: 3392 - DNA, 20 bp, Artificial
  20-mer unique DNA sequence
acccgccgatgccagatatg

SEQ ID NO: 3393 - DNA, 20 bp, Artificial
  20-mer unique DNA sequence
gcaatgggcacgggaacaaa

SEQ ID NO: 3394 - DNA, 20 bp, Artificial
  20-mer unique DNA sequence
tccaatgcagtcccccgttt

SEQ ID NO: 3395 - DNA, 20 bp, Artificial
  20-mer unique DNA sequence
gatggaatgcgggggaatga

SEQ ID NO: 3396 - DNA, 20 bp, Artificial
  20-mer unique DNA sequence
acgcccaaggtcaaaggcca

SEQ ID NO: 3397 - DNA, 20 bp, Artificial
  20-mer unique DNA sequence
cgtgcaagccaggtccaaaa

SEQ ID NO: 3398 - DNA, 20 bp, Artificial
  20-mer unique DNA sequence
acgtgagcgtacgtgcgaat

SEQ ID NO: 3399 - DNA, 20 bp, Artificial
  20-mer unique DNA sequence
cctagcgcatatagcccgca

SEQ ID NO: 3400 - DNA, 20 bp, Artificial
  20-mer unique DNA sequence
ttgacggccggcaggtattt

SEQ ID NO: 3401 - DNA, 20 bp, Artificial
  20-mer unique DNA sequence
taccaccagcgcgcacacct

SEQ ID NO: 3402 - DNA, 20 bp, Artificial
  20-mer unique DNA sequence
tgagcgcgaagtgtgggagt

SEQ ID NO: 3403 - DNA, 20 bp, Artificial
  20-mer unique DNA sequence
tcccccctaccgaccccctc

SEQ ID NO: 3404 - DNA, 20 bp, Artificial
  20-mer unique DNA sequence
agcgccgtgtgatttggaca

SEQ ID NO: 3405 - DNA, 20 bp, Artificial
  20-mer unique DNA sequence
cccactgcattaggcgcacc

SEQ ID NO: 3406 - DNA, 20 bp, Artificial
  20-mer unique DNA sequence
gcgcgtggagataaaaggcg

SEQ ID NO: 3407 - DNA, 20 bp, Artificial
  20-mer unique DNA sequence
cagggatcggcataacggcg

SEQ ID NO: 3408 - DNA, 20 bp, Artificial
  20-mer unique DNA sequence
cgggggggctgtcctaattt

SEQ ID NO: 3409 - DNA, 20 bp, Artificial
  20-mer unique DNA sequence
aaattaatgggggtcgtgcg

SEQ ID NO: 3410 - DNA, 20 bp, Artificial
  20-mer unique DNA sequence
cctcctggccgctgaatcca

SEQ ID NO: 3411 - DNA, 20 bp, Artificial
  20-mer unique DNA sequence
tcccgcccggtaatcagtgg

SEQ ID NO: 3412 - DNA, 20 bp, Artificial
  20-mer unique DNA sequence
acaacaaaatgcaccacccg

SEQ ID NO: 3413 - DNA, 20 bp, Artificial
  20-mer unique DNA sequence
cgaacgcggcaccagaatag

SEQ ID NO: 3414 - DNA, 20 bp, Artificial
  20-mer unique DNA sequence
cgcatcccgtttccccagag

SEQ ID NO: 3415 - DNA, 20 bp, Artificial
  20-mer unique DNA sequence
aagccgccctacaaaccccg

SEQ ID NO: 3416 - DNA, 20 bp, Artificial
  20-mer unique DNA sequence
ctgcccgaccgcccctctta

SEQ ID NO: 3417 - DNA, 20 bp, Artificial
  20-mer unique DNA sequence
cgagaaacctgccaacccgc

SEQ ID NO: 3418 - DNA, 20 bp, Artificial
  20-mer unique DNA sequence
tacggctggcgggtttgagg

SEQ ID NO: 3419 - DNA, 20 bp, Artificial
  20-mer unique DNA sequence
ggtttggatggggcggtctg

SEQ ID NO: 3420 - DNA, 20 bp, Artificial
  20-mer unique DNA sequence
gcgcatggttgggttgggac

SEQ ID NO: 3421 - DNA, 20 bp, Artificial
  20-mer unique DNA sequence
cggacccttcttacccccga

SEQ ID NO: 3422 - DNA, 20 bp, Artificial
  20-mer unique DNA sequence
taggttggcgcaaagggctc

SEQ ID NO: 3423 - DNA, 20 bp, Artificial
  20-mer unique DNA sequence
atgcgttctccaatgcggtg

SEQ ID NO: 3424 - DNA, 20 bp, Artificial
  20-mer unique DNA sequence
gctgacgcggattggactgg

SEQ ID NO: 3425 - DNA, 20 bp, Artificial
  20-mer unique DNA sequence
gaggttgtcgcgcgggtcag

SEQ ID NO: 3426 - DNA, 20 bp, Artificial
  20-mer unique DNA sequence
tctgtgctaccgggggggaa

SEQ ID NO: 3427 - DNA, 20 bp, Artificial
  20-mer unique DNA sequence
accctaacaaacggcccggg

SEQ ID NO: 3428 - DNA, 20 bp, Artificial
  20-mer unique DNA sequence
tgccacaacccatctcgcgt

SEQ ID NO: 3429 - DNA, 20 bp, Artificial
  20-mer unique DNA sequence
cttcacccggccgcatcaaa

SEQ ID NO: 3430 - DNA, 20 bp, Artificial
  20-mer unique DNA sequence
ttctcgctcctacgcaccag

SEQ ID NO: 3431 - DNA, 20 bp, Artificial
  20-mer unique DNA sequence
cagcaatgagcaagccccgt

SEQ ID NO: 3432 - DNA, 20 bp, Artificial
  20-mer unique DNA sequence
gaacgcagggagaatgggca

SEQ ID NO: 3433 - DNA, 20 bp, Artificial
  20-mer unique DNA sequence
cgtaactagacgtgccggcg

SEQ ID NO: 3434 - DNA, 20 bp, Artificial
  20-mer unique DNA sequence
attcacgtccggcccaagca

SEQ ID NO: 3435 - DNA, 20 bp, Artificial
  20-mer unique DNA sequence
tctcaccgcgccgaacatct

SEQ ID NO: 3436 - DNA, 20 bp, Artificial
  20-mer unique DNA sequence
ttgcactccagcacgatccc

SEQ ID NO: 3437 - DNA, 20 bp, Artificial
  20-mer unique DNA sequence
gcttgaccgcggatttcccg

SEQ ID NO: 3438 - DNA, 20 bp, Artificial
  20-mer unique DNA sequence
acggcgctgttcgtaccatg

SEQ ID NO: 3439 - DNA, 20 bp, Artificial
  20-mer unique DNA sequence
gccaaacgcatcaggcatcc

SEQ ID NO: 3440 - DNA, 20 bp, Artificial
  20-mer unique DNA sequence
gtgcggctatacctgggatg

SEQ ID NO: 3441 - DNA, 20 bp, Artificial
  20-mer unique DNA sequence
tagtgggcagggtgagaggc

SEQ ID NO: 3442 - DNA, 20 bp, Artificial
  20-mer unique DNA sequence
tccagtaccccgcttgccac

SEQ ID NO: 3443 - DNA, 20 bp, Artificial
  20-mer unique DNA sequence
tgccgtgccccagatagtcc

SEQ ID NO: 3444 - DNA, 20 bp, Artificial
  20-mer unique DNA sequence
catgctcttgtcgtgggccg

SEQ ID NO: 3445 - DNA, 20 bp, Artificial
  20-mer unique DNA sequence
tgttggccctcccctgtcat

SEQ ID NO: 3446 - DNA, 20 bp, Artificial
  20-mer unique DNA sequence
ccccccctagaataaccgcg

SEQ ID NO: 3447 - DNA, 20 bp, Artificial
  20-mer unique DNA sequence
accttggttacgcggtcgct

SEQ ID NO: 3448 - DNA, 20 bp, Artificial
  20-mer unique DNA sequence
tagcacatggcggggggttg

SEQ ID NO: 3449 - DNA, 20 bp, Artificial
  20-mer unique DNA sequence
tacccggaacgcgactgcac

SEQ ID NO: 3450 - DNA, 20 bp, Artificial
  20-mer unique DNA sequence
tggttgggcgttcgggagta

SEQ ID NO: 3451 - DNA, 20 bp, Artificial
  20-mer unique DNA sequence
gcctgcttattcgggccaag

SEQ ID NO: 3452 - DNA, 20 bp, Artificial
  20-mer unique DNA sequence
gggcctccgaaaatctgctg

SEQ ID NO: 3453 - DNA, 20 bp, Artificial
  20-mer unique DNA sequence
cgggcaacgagcagaagcag

SEQ ID NO: 3454 - DNA, 20 bp, Artificial
  20-mer unique DNA sequence
cccaatcaggtttcgtgcca

SEQ ID NO: 3455 - DNA, 20 bp, Artificial
  20-mer unique DNA sequence
caggccgtagcccaaccatg

SEQ ID NO: 3456 - DNA, 20 bp, Artificial
  20-mer unique DNA sequence
cggggaacagctgagttgga

SEQ ID NO: 3457 - DNA, 20 bp, Artificial
  20-mer unique DNA sequence
ctgattcgataccgggcggc

SEQ ID NO: 3458 - DNA, 20 bp, Artificial
  20-mer unique DNA sequence
agtgacaccgatgagggcgg

SEQ ID NO: 3459 - DNA, 20 bp, Artificial
  20-mer unique DNA sequence
gggacccaccccattgtctg

SEQ ID NO: 3460 - DNA, 20 bp, Artificial
  20-mer unique DNA sequence
ccctcccgcacaagcaaggt

SEQ ID NO: 3461 - DNA, 20 bp, Artificial
  20-mer unique DNA sequence
tcctcctttcgcttcccacg

SEQ ID NO: 3462 - DNA, 20 bp, Artificial
  20-mer unique DNA sequence
aaatcccccacgcgcagaac

SEQ ID NO: 3463 - DNA, 20 bp, Artificial
  20-mer unique DNA sequence
tgcgttttgatgacccccga

SEQ ID NO: 3464 - DNA, 20 bp, Artificial
  20-mer unique DNA sequence
ggtatggcttttccccgcgt

SEQ ID NO: 3465 - DNA, 20 bp, Artificial
  20-mer unique DNA sequence
ttccatgtcttccgcgctcc

SEQ ID NO: 3466 - DNA, 20 bp, Artificial
  20-mer unique DNA sequence
aatggaacgggaagctgcgg

SEQ ID NO: 3467 - DNA, 20 bp, Artificial
  20-mer unique DNA sequence
cacggcgggatgaataaggc

SEQ ID NO: 3468 - DNA, 20 bp, Artificial
  20-mer unique DNA sequence
gcaggttgctacagagtgcg

SEQ ID NO: 3469 - DNA, 20 bp, Artificial
  20-mer unique DNA sequence
ctccacctttacccgaccgc

SEQ ID NO: 3470 - DNA, 20 bp, Artificial
  20-mer unique DNA sequence
gttggcgtgggtggtctggt

SEQ ID NO: 3471 - DNA, 20 bp, Artificial
  20-mer unique DNA sequence
gcgaaggcgagttgggggta

SEQ ID NO: 3472 - DNA, 20 bp, Artificial
  20-mer unique DNA sequence
gcccgtacccacaccattgc

SEQ ID NO: 3473 - DNA, 20 bp, Artificial
  20-mer unique DNA sequence
ctttgcgcgaggtggaggtt

SEQ ID NO: 3474 - DNA, 20 bp, Artificial
  20-mer unique DNA sequence
tccacattttgcccccccag

SEQ ID NO: 3475 - DNA, 20 bp, Artificial
  20-mer unique DNA sequence
ggcaacaagcagggggtgtg

SEQ ID NO: 3476 - DNA, 20 bp, Artificial
  20-mer unique DNA sequence
tgctcaaccgtccgcatccc

SEQ ID NO: 3477 - DNA, 20 bp, Artificial
  20-mer unique DNA sequence
gccctataggacctcccccg

SEQ ID NO: 3478 - DNA, 20 bp, Artificial
  20-mer unique DNA sequence
tactggacggaacgagcggg

SEQ ID NO: 3479 - DNA, 20 bp, Artificial
  20-mer unique DNA sequence
ctggctaggctggggggttt

SEQ ID NO: 3480 - DNA, 20 bp, Artificial
  20-mer unique DNA sequence
caagaggaatacgcccggca

SEQ ID NO: 3481 - DNA, 20 bp, Artificial
  20-mer unique DNA sequence
caccccgacgtgcgagaact

SEQ ID NO: 3482 - DNA, 20 bp, Artificial
  20-mer unique DNA sequence
tccctttttcccctcatgca

SEQ ID NO: 3483 - DNA, 20 bp, Artificial
  20-mer unique DNA sequence
tttcgctgggccgtttttct

SEQ ID NO: 3484 - DNA, 20 bp, Artificial
  20-mer unique DNA sequence
gcacgtaggccgggttcacc

SEQ ID NO: 3485 - DNA, 20 bp, Artificial
  20-mer unique DNA sequence
ttattcgcctccgaccccct

SEQ ID NO: 3486 - DNA, 20 bp, Artificial
  20-mer unique DNA sequence
ctagacgaggctggcgcgga

SEQ ID NO: 3487 - DNA, 20 bp, Artificial
  20-mer unique DNA sequence
tatttgggaaacggcgcgtg

SEQ ID NO: 3488 - DNA, 20 bp, Artificial
  20-mer unique DNA sequence
gggggacgacagagcgggac

SEQ ID NO: 3489 - DNA, 20 bp, Artificial
  20-mer unique DNA sequence
tacccgtttcgcttgccgtc

SEQ ID NO: 3490 - DNA, 20 bp, Artificial
  20-mer unique DNA sequence
ggataggtttggggggctgc

SEQ ID NO: 3491 - DNA, 20 bp, Artificial
  20-mer unique DNA sequence
acccgagaatgccccaatgc

SEQ ID NO: 3492 - DNA, 20 bp, Artificial
  20-mer unique DNA sequence
gcccacattacgtccccagg

SEQ ID NO: 3493 - DNA, 20 bp, Artificial
  20-mer unique DNA sequence
tgccaaaagggtaccgccac

SEQ ID NO: 3494 - DNA, 20 bp, Artificial
  20-mer unique DNA sequence
gacaacgctggtcgggtggc

SEQ ID NO: 3495 - DNA, 20 bp, Artificial
  20-mer unique DNA sequence
acacacccacgcctggaacg

SEQ ID NO: 3496 - DNA, 20 bp, Artificial
  20-mer unique DNA sequence
gcttcatcccgaaccgacct

SEQ ID NO: 3497 - DNA, 20 bp, Artificial
  20-mer unique DNA sequence
ccccgtagctgtcccctcag

SEQ ID NO: 3498 - DNA, 20 bp, Artificial
  20-mer unique DNA sequence
agacgcgacccgtcaagtca

SEQ ID NO: 3499 - DNA, 20 bp, Artificial
  20-mer unique DNA sequence
atcaccagagcactccgggt

SEQ ID NO: 3500 - DNA, 20 bp, Artificial
  20-mer unique DNA sequence
gaggccgggattaggggtgt

SEQ ID NO: 3501 - DNA, 20 bp, Artificial
  20-mer unique DNA sequence
cacgaactagcacgaggccg

SEQ ID NO: 3502 - DNA, 20 bp, Artificial
  20-mer unique DNA sequence
gctgggaaatcgcggcccta

SEQ ID NO: 3503 - DNA, 20 bp, Artificial
  20-mer unique DNA sequence
cctaccacatcctggcgcgg

SEQ ID NO: 3504 - DNA, 20 bp, Artificial
  20-mer unique DNA sequence
accggccgtcccaagttcat

SEQ ID NO: 3505 - DNA, 20 bp, Artificial
  20-mer unique DNA sequence
gattggggcgacggttgggt

SEQ ID NO: 3506 - DNA, 20 bp, Artificial
  20-mer unique DNA sequence
cgcctaacgcaagggagaca

SEQ ID NO: 3507 - DNA, 20 bp, Artificial
  20-mer unique DNA sequence
ccgccccttcctggtcattc

SEQ ID NO: 3508 - DNA, 20 bp, Artificial
  20-mer unique DNA sequence
caggcaggggtaagtccggc

SEQ ID NO: 3509 - DNA, 20 bp, Artificial
  20-mer unique DNA sequence
tcggattccttttgcgggtc

SEQ ID NO: 3510 - DNA, 20 bp, Artificial
  20-mer unique DNA sequence
caaccggccgctgacatttc

SEQ ID NO: 3511 - DNA, 20 bp, Artificial
  20-mer unique DNA sequence
cggattcgtttgggcgtgac

SEQ ID NO: 3512 - DNA, 20 bp, Artificial
  20-mer unique DNA sequence
atccgctcgagattggtccg

SEQ ID NO: 3513 - DNA, 20 bp, Artificial
  20-mer unique DNA sequence
tttgggtgcaccgcttcagg

SEQ ID NO: 3514 - DNA, 20 bp, Artificial
  20-mer unique DNA sequence
agatcggcaatgtcagcggc

SEQ ID NO: 3515 - DNA, 20 bp, Artificial
  20-mer unique DNA sequence
gcgtcgtgctcatacgttcc

SEQ ID NO: 3516 - DNA, 20 bp, Artificial
  20-mer unique DNA sequence
tacttggctgctgacggcgg

SEQ ID NO: 3517 - DNA, 20 bp, Artificial
  20-mer unique DNA sequence
ttctctttcgggggctagcg

SEQ ID NO: 3518 - DNA, 20 bp, Artificial
  20-mer unique DNA sequence
aaaagcaggagtggagggca

SEQ ID NO: 3519 - DNA, 20 bp, Artificial
  20-mer unique DNA sequence
aggcccatccaccagtccca

SEQ ID NO: 3520 - DNA, 20 bp, Artificial
  20-mer unique DNA sequence
gtatcagggacgggagcggc

SEQ ID NO: 3521 - DNA, 20 bp, Artificial
  20-mer unique DNA sequence
taggacccccgcacatcacc

SEQ ID NO: 3522 - DNA, 20 bp, Artificial
  20-mer unique DNA sequence
tctggcgcggttgtgattct

SEQ ID NO: 3523 - DNA, 20 bp, Artificial
  20-mer unique DNA sequence
ttctgtgcttcgcggctctc

SEQ ID NO: 3524 - DNA, 20 bp, Artificial
  20-mer unique DNA sequence
cacttaatccgggcggtgca

SEQ ID NO: 3525 - DNA, 20 bp, Artificial
  20-mer unique DNA sequence
gccgttttcccgagtctgca

SEQ ID NO: 3526 - DNA, 20 bp, Artificial
  20-mer unique DNA sequence
acagagccgtgcgctcaaga

SEQ ID NO: 3527 - DNA, 20 bp, Artificial
  20-mer unique DNA sequence
tcgcgtcgcgcctctactaa

SEQ ID NO: 3528 - DNA, 20 bp, Artificial
  20-mer unique DNA sequence
caggtggggtggacgtcgag

SEQ ID NO: 3529 - DNA, 20 bp, Artificial
  20-mer unique DNA sequence
cgcgcgggtgaatgtaaaaa

SEQ ID NO: 3530 - DNA, 20 bp, Artificial
  20-mer unique DNA sequence
tggcagtgagtgggtggata

SEQ ID NO: 3531 - DNA, 20 bp, Artificial
  20-mer unique DNA sequence
gccacgataagcaccgggat

SEQ ID NO: 3532 - DNA, 20 bp, Artificial
  20-mer unique DNA sequence
tgcacctaccggccaccctg

SEQ ID NO: 3533 - DNA, 20 bp, Artificial
  20-mer unique DNA sequence
tcgagcccccagcccaatct

SEQ ID NO: 3534 - DNA, 20 bp, Artificial
  20-mer unique DNA sequence
gtgtgggtctccggctcgat

SEQ ID NO: 3535 - DNA, 20 bp, Artificial
  20-mer unique DNA sequence
cccgggatcgatattgagcg

SEQ ID NO: 3536 - DNA, 20 bp, Artificial
  20-mer unique DNA sequence
cccaaacccctcctctcccg

SEQ ID NO: 3537 - DNA, 20 bp, Artificial
  20-mer unique DNA sequence
tgggtcggattggttgggtt

SEQ ID NO: 3538 - DNA, 20 bp, Artificial
  20-mer unique DNA sequence
tcctgtttgtgggggttgcg

SEQ ID NO: 3539 - DNA, 20 bp, Artificial
  20-mer unique DNA sequence
ggctgtaaagtgggggacga

SEQ ID NO: 3540 - DNA, 20 bp, Artificial
  20-mer unique DNA sequence
gcggtctgtgctttcccttc

SEQ ID NO: 3541 - DNA, 20 bp, Artificial
  20-mer unique DNA sequence
gggagccggaaagagcgaca

SEQ ID NO: 3542 - DNA, 20 bp, Artificial
  20-mer unique DNA sequence
tcccactttcgcctccccgt

SEQ ID NO: 3543 - DNA, 20 bp, Artificial
  20-mer unique DNA sequence
tgtgtccccgtccgctctcc

SEQ ID NO: 3544 - DNA, 20 bp, Artificial
  20-mer unique DNA sequence
ataattccgtgaggcggcga

SEQ ID NO: 3545 - DNA, 20 bp, Artificial
  20-mer unique DNA sequence
acttgcttctcccaccctcg

SEQ ID NO: 3546 - DNA, 20 bp, Artificial
  20-mer unique DNA sequence
acgaattgggaggcggcggt

SEQ ID NO: 3547 - DNA, 20 bp, Artificial
  20-mer unique DNA sequence
ccttttccgaggcgcttcta

SEQ ID NO: 3548 - DNA, 20 bp, Artificial
  20-mer unique DNA sequence
gggatccggccagttcatga

SEQ ID NO: 3549 - DNA, 20 bp, Artificial
  20-mer unique DNA sequence
cggtggtggtgggtcgctat

SEQ ID NO: 3550 - DNA, 20 bp, Artificial
  20-mer unique DNA sequence
tattcaccgtcctcccccga

SEQ ID NO: 3551 - DNA, 20 bp, Artificial
  20-mer unique DNA sequence
gggaggggaatgggggacta

SEQ ID NO: 3552 - DNA, 20 bp, Artificial
  20-mer unique DNA sequence
cgacaggtcactcgcgtact

SEQ ID NO: 3553 - DNA, 20 bp, Artificial
  20-mer unique DNA sequence
acccaccccgcttacatccc

SEQ ID NO: 3554 - DNA, 20 bp, Artificial
  20-mer unique DNA sequence
gttgagtgagatgcggcggc

SEQ ID NO: 3555 - DNA, 20 bp, Artificial
  20-mer unique DNA sequence
atccccgcccatccagatca

SEQ ID NO: 3556 - DNA, 20 bp, Artificial
  20-mer unique DNA sequence
acgcctcactgcgagagaaa

SEQ ID NO: 3557 - DNA, 20 bp, Artificial
  20-mer unique DNA sequence
gcctgaaaaccgatgtgggg

SEQ ID NO: 3558 - DNA, 20 bp, Artificial
  20-mer unique DNA sequence
gtgcccgcaggttggtatcc

SEQ ID NO: 3559 - DNA, 20 bp, Artificial
  20-mer unique DNA sequence
ttatacgggtcggcggaagg

SEQ ID NO: 3560 - DNA, 20 bp, Artificial
  20-mer unique DNA sequence
tgacgacccctcctcccatg

SEQ ID NO: 3561 - DNA, 20 bp, Artificial
  20-mer unique DNA sequence
agcggctactaacgccatgt

SEQ ID NO: 3562 - DNA, 20 bp, Artificial
  20-mer unique DNA sequence
cccgcccacagccaagagaa

SEQ ID NO: 3563 - DNA, 20 bp, Artificial
  20-mer unique DNA sequence
ggcagggcgcatcgaagtac

SEQ ID NO: 3564 - DNA, 20 bp, Artificial
  20-mer unique DNA sequence
gcacgtggagcacagaaggg

SEQ ID NO: 3565 - DNA, 20 bp, Artificial
  20-mer unique DNA sequence
ccctagctggcactttcccg

SEQ ID NO: 3566 - DNA, 20 bp, Artificial
  20-mer unique DNA sequence
cgggtcggttaggctgctgg

SEQ ID NO: 3567 - DNA, 20 bp, Artificial
  20-mer unique DNA sequence
cgccgctggatgtggagagg

SEQ ID NO: 3568 - DNA, 20 bp, Artificial
  20-mer unique DNA sequence
acgacggctggctagttgcg

SEQ ID NO: 3569 - DNA, 20 bp, Artificial
  20-mer unique DNA sequence
aaacctttcatgcggcccgg

SEQ ID NO: 3570 - DNA, 20 bp, Artificial
  20-mer unique DNA sequence
taccacaagacgacggggca

SEQ ID NO: 3571 - DNA, 20 bp, Artificial
  20-mer unique DNA sequence
tccccggcgttttcattctc

SEQ ID NO: 3572 - DNA, 20 bp, Artificial
  20-mer unique DNA sequence
gcgtgggccgaagtgatgct

SEQ ID NO: 3573 - DNA, 20 bp, Artificial
  20-mer unique DNA sequence
attttccacaaggcccccca

SEQ ID NO: 3574 - DNA, 20 bp, Artificial
  20-mer unique DNA sequence
cttggctcgggtcgggatac

SEQ ID NO: 3575 - DNA, 20 bp, Artificial
  20-mer unique DNA sequence
gttctgtccgccccctcacc

SEQ ID NO: 3576 - DNA, 20 bp, Artificial
  20-mer unique DNA sequence
aatggggcagtggtcggaga

SEQ ID NO: 3577 - DNA, 20 bp, Artificial
  20-mer unique DNA sequence
ggctcgggatttcattggca

SEQ ID NO: 3578 - DNA, 20 bp, Artificial
  20-mer unique DNA sequence
gggcaccagagccagcagtt

SEQ ID NO: 3579 - DNA, 20 bp, Artificial
  20-mer unique DNA sequence
gcttggtgagtggcgtcggt

SEQ ID NO: 3580 - DNA, 20 bp, Artificial
  20-mer unique DNA sequence
tacagtgcatggaagggcgg

SEQ ID NO: 3581 - DNA, 20 bp, Artificial
  20-mer unique DNA sequence
tgcatccaacccacgtcgaa

SEQ ID NO: 3582 - DNA, 20 bp, Artificial
  20-mer unique DNA sequence
taagcacgccgccgaagaaa

SEQ ID NO: 3583 - DNA, 20 bp, Artificial
  20-mer unique DNA sequence
ggttcccattgcctgcccta

SEQ ID NO: 3584 - DNA, 20 bp, Artificial
  20-mer unique DNA sequence
acacggagcgagggaggaaa

SEQ ID NO: 3585 - DNA, 20 bp, Artificial
  20-mer unique DNA sequence
ccatggcgcgctaactttcc

SEQ ID NO: 3586 - DNA, 20 bp, Artificial
  20-mer unique DNA sequence
tcgctggggtctggtcaatg

SEQ ID NO: 3587 - DNA, 20 bp, Artificial
  20-mer unique DNA sequence
ttccaacgcctcccaacctg

SEQ ID NO: 3588 - DNA, 20 bp, Artificial
  20-mer unique DNA sequence
cgaccttaattccgcgccct

SEQ ID NO: 3589 - DNA, 20 bp, Artificial
  20-mer unique DNA sequence
tccccccccgtcatgttggt

SEQ ID NO: 3590 - DNA, 20 bp, Artificial
  20-mer unique DNA sequence
tgaacctcctcgcccctgat

SEQ ID NO: 3591 - DNA, 20 bp, Artificial
  20-mer unique DNA sequence
cgtaccccatgcccttgcgt

SEQ ID NO: 3592 - DNA, 20 bp, Artificial
  20-mer unique DNA sequence
ttacgtaccccagcgcccac

SEQ ID NO: 3593 - DNA, 20 bp, Artificial
  20-mer unique DNA sequence
atatctcttgcccgccgtcg

SEQ ID NO: 3594 - DNA, 20 bp, Artificial
  20-mer unique DNA sequence
acgccccaacacgaaggaag

SEQ ID NO: 3595 - DNA, 20 bp, Artificial
  20-mer unique DNA sequence
tccccatctctgcctccgac

SEQ ID NO: 3596 - DNA, 20 bp, Artificial
  20-mer unique DNA sequence
cccaacccaggaggccaatc

SEQ ID NO: 3597 - DNA, 20 bp, Artificial
  20-mer unique DNA sequence
agtcggtggtgcgttcgtgc

SEQ ID NO: 3598 - DNA, 20 bp, Artificial
  20-mer unique DNA sequence
tacgcgcttcatccggcaat

SEQ ID NO: 3599 - DNA, 20 bp, Artificial
  20-mer unique DNA sequence
taccgcatgcaaccgggaac

SEQ ID NO: 3600 - DNA, 20 bp, Artificial
  20-mer unique DNA sequence
tgcctcgccaccgttttacg

SEQ ID NO: 3601 - DNA, 20 bp, Artificial
  20-mer unique DNA sequence
cggaaccccccccaaaatat

SEQ ID NO: 3602 - DNA, 20 bp, Artificial
  20-mer unique DNA sequence
tgtctgtggcctcgctggat

SEQ ID NO: 3603 - DNA, 20 bp, Artificial
  20-mer unique DNA sequence
tgcagcgacaccccggatac

SEQ ID NO: 3604 - DNA, 20 bp, Artificial
  20-mer unique DNA sequence
cctggccgggctttttgaga

SEQ ID NO: 3605 - DNA, 20 bp, Artificial
  20-mer unique DNA sequence
gtgcggcgcgcttttttgtc

SEQ ID NO: 3606 - DNA, 20 bp, Artificial
  20-mer unique DNA sequence
gcgcgggtgtctgtgattgg

SEQ ID NO: 3607 - DNA, 20 bp, Artificial
  20-mer unique DNA sequence
cgttcgggggttgctgcctt

SEQ ID NO: 3608 - DNA, 20 bp, Artificial
  20-mer unique DNA sequence
ttgtttccggtcccgtaggg

SEQ ID NO: 3609 - DNA, 20 bp, Artificial
  20-mer unique DNA sequence
gccgctttactgcgttcccc

SEQ ID NO: 3610 - DNA, 20 bp, Artificial
  20-mer unique DNA sequence
tctaatctttccccccccat

SEQ ID NO: 3611 - DNA, 20 bp, Artificial
  20-mer unique DNA sequence
cggctccccatccacaaagg

SEQ ID NO: 3612 - DNA, 20 bp, Artificial
  20-mer unique DNA sequence
ggagcctcatgccaccgtct

SEQ ID NO: 3613 - DNA, 20 bp, Artificial
  20-mer unique DNA sequence
ctgcccagcctgccctagat

SEQ ID NO: 3614 - DNA, 20 bp, Artificial
  20-mer unique DNA sequence
agatccctgaatgacgccgc

SEQ ID NO: 3615 - DNA, 20 bp, Artificial
  20-mer unique DNA sequence
cgttggggtgggttcgaatg

SEQ ID NO: 3616 - DNA, 20 bp, Artificial
  20-mer unique DNA sequence
tttgaccccgcacttcccag

SEQ ID NO: 3617 - DNA, 20 bp, Artificial
  20-mer unique DNA sequence
caaagggtccggccgaagtt

SEQ ID NO: 3618 - DNA, 20 bp, Artificial
  20-mer unique DNA sequence
tcccctcccacgtcattgcc

SEQ ID NO: 3619 - DNA, 20 bp, Artificial
  20-mer unique DNA sequence
gtgccgtgtcccttgtccga

SEQ ID NO: 3620 - DNA, 20 bp, Artificial
  20-mer unique DNA sequence
cgacacagacatcccgaccg

SEQ ID NO: 3621 - DNA, 20 bp, Artificial
  20-mer unique DNA sequence
tgtaaccccccagccacgat

SEQ ID NO: 3622 - DNA, 20 bp, Artificial
  20-mer unique DNA sequence
cgcacgcgtattggggatct

SEQ ID NO: 3623 - DNA, 20 bp, Artificial
  20-mer unique DNA sequence
cgacggaacaagtgagcggg

SEQ ID NO: 3624 - DNA, 20 bp, Artificial
  20-mer unique DNA sequence
ccacgatggggggtgttcaa

SEQ ID NO: 3625 - DNA, 20 bp, Artificial
  20-mer unique DNA sequence
tcgggtgtctgcgggaaagc

SEQ ID NO: 3626 - DNA, 20 bp, Artificial
  20-mer unique DNA sequence
gggggtggggtggctaattg

SEQ ID NO: 3627 - DNA, 20 bp, Artificial
  20-mer unique DNA sequence
tcctctgggcgtcttgcaaa

SEQ ID NO: 3628 - DNA, 20 bp, Artificial
  20-mer unique DNA sequence
ctgggaataagccccccccc

SEQ ID NO: 3629 - DNA, 20 bp, Artificial
  20-mer unique DNA sequence
cggaagtaaacaacgcgggc

SEQ ID NO: 3630 - DNA, 20 bp, Artificial
  20-mer unique DNA sequence
gggcattggattggcagagg

SEQ ID NO: 3631 - DNA, 20 bp, Artificial
  20-mer unique DNA sequence
gttgcaaccccccagcctct

SEQ ID NO: 3632 - DNA, 20 bp, Artificial
  20-mer unique DNA sequence
atgccactattcccttcgcc

SEQ ID NO: 3633 - DNA, 20 bp, Artificial
  20-mer unique DNA sequence
cgacgggtgcaactctccaa

SEQ ID NO: 3634 - DNA, 20 bp, Artificial
  20-mer unique DNA sequence
tgctcgccgttttacgaccg

SEQ ID NO: 3635 - DNA, 20 bp, Artificial
  20-mer unique DNA sequence
tcgctatcgacgcccttgtg

SEQ ID NO: 3636 - DNA, 20 bp, Artificial
  20-mer unique DNA sequence
tcggctgcttcttttgcggt

SEQ ID NO: 3637 - DNA, 20 bp, Artificial
  20-mer unique DNA sequence
ttccgtggtgcgtgttgtcg

SEQ ID NO: 3638 - DNA, 20 bp, Artificial
  20-mer unique DNA sequence
cgctccacgcccctctacat

SEQ ID NO: 3639 - DNA, 20 bp, Artificial
  20-mer unique DNA sequence
tggaggcggggcttggattt

SEQ ID NO: 3640 - DNA, 20 bp, Artificial
  20-mer unique DNA sequence
ggtggggctggctgttattg

SEQ ID NO: 3641 - DNA, 20 bp, Artificial
  20-mer unique DNA sequence
ttgggcggacgggtacttct

SEQ ID NO: 3642 - DNA, 20 bp, Artificial
  20-mer unique DNA sequence
cagaacctgccaaagggccc

SEQ ID NO: 3643 - DNA, 20 bp, Artificial
  20-mer unique DNA sequence
acgtgtgtcgtggcaatact

SEQ ID NO: 3644 - DNA, 20 bp, Artificial
  20-mer unique DNA sequence
cagcctaccgcggacacaaa

SEQ ID NO: 3645 - DNA, 20 bp, Artificial
  20-mer unique DNA sequence
aaatgttcgcacgctcccgc

SEQ ID NO: 3646 - DNA, 20 bp, Artificial
  20-mer unique DNA sequence
catgctttgcgaacgggctt

SEQ ID NO: 3647 - DNA, 20 bp, Artificial
  20-mer unique DNA sequence
cggttcggctcctcgtctca

SEQ ID NO: 3648 - DNA, 20 bp, Artificial
  20-mer unique DNA sequence
acaggcgggagaggagaggg

SEQ ID NO: 3649 - DNA, 20 bp, Artificial
  20-mer unique DNA sequence
tcggggctggggactgacaa

SEQ ID NO: 3650 - DNA, 20 bp, Artificial
  20-mer unique DNA sequence
tttcgtccccacaaccccat

SEQ ID NO: 3651 - DNA, 20 bp, Artificial
  20-mer unique DNA sequence
ggtggcaaacgggctgagaa

SEQ ID NO: 3652 - DNA, 20 bp, Artificial
  20-mer unique DNA sequence
cggaaaccaagccgcaaagc

SEQ ID NO: 3653 - DNA, 20 bp, Artificial
  20-mer unique DNA sequence
cgcacgcctacataccgccc

SEQ ID NO: 3654 - DNA, 20 bp, Artificial
  20-mer unique DNA sequence
tagctagcaggcgtgtccct

SEQ ID NO: 3655 - DNA, 20 bp, Artificial
  20-mer unique DNA sequence
cacggcaaacccagaccgaa

SEQ ID NO: 3656 - DNA, 20 bp, Artificial
  20-mer unique DNA sequence
gccctcgtacagcccatctt

SEQ ID NO: 3657 - DNA, 20 bp, Artificial
  20-mer unique DNA sequence
ccggtctcgcctttggttgt

SEQ ID NO: 3658 - DNA, 20 bp, Artificial
  20-mer unique DNA sequence
ctgcacaagccgcgaaagtc

SEQ ID NO: 3659 - DNA, 20 bp, Artificial
  20-mer unique DNA sequence
atgaaccaaacgcgcacccc

SEQ ID NO: 3660 - DNA, 20 bp, Artificial
  20-mer unique DNA sequence
caaaaccgccaacagcacgc

SEQ ID NO: 3661 - DNA, 20 bp, Artificial
  20-mer unique DNA sequence
ggagggatcggccatgacaa

SEQ ID NO: 3662 - DNA, 20 bp, Artificial
  20-mer unique DNA sequence
cggaagaggggggacacgag

SEQ ID NO: 3663 - DNA, 20 bp, Artificial
  20-mer unique DNA sequence
cgcacgcctaaccgaaacct

SEQ ID NO: 3664 - DNA, 20 bp, Artificial
  20-mer unique DNA sequence
gagacccacctcaggcgacc

SEQ ID NO: 3665 - DNA, 20 bp, Artificial
  20-mer unique DNA sequence
tgagaatagatgcgccgccc

SEQ ID NO: 3666 - DNA, 20 bp, Artificial
  20-mer unique DNA sequence
caagattcggccgcgggtag

SEQ ID NO: 3667 - DNA, 20 bp, Artificial
  20-mer unique DNA sequence
tcgtcacccgccttacccat

SEQ ID NO: 3668 - DNA, 20 bp, Artificial
  20-mer unique DNA sequence
acgcaaggcccagcaaacag

SEQ ID NO: 3669 - DNA, 20 bp, Artificial
  20-mer unique DNA sequence
cgacggactaccccccacat

SEQ ID NO: 3670 - DNA, 20 bp, Artificial
  20-mer unique DNA sequence
tgtggatggtgctgggatgc

SEQ ID NO: 3671 - DNA, 20 bp, Artificial
  20-mer unique DNA sequence
gccctcccacacgacatcca

SEQ ID NO: 3672 - DNA, 20 bp, Artificial
  20-mer unique DNA sequence
ccccatgcagaaaaacgccg

SEQ ID NO: 3673 - DNA, 20 bp, Artificial
  20-mer unique DNA sequence
ccccccagcggactcaaaga

SEQ ID NO: 3674 - DNA, 20 bp, Artificial
  20-mer unique DNA sequence
cattcgtatccgccttccgc

SEQ ID NO: 3675 - DNA, 20 bp, Artificial
  20-mer unique DNA sequence
accattgccaccccgttccg

SEQ ID NO: 3676 - DNA, 20 bp, Artificial
  20-mer unique DNA sequence
tgcttcctacgcgctagcct

SEQ ID NO: 3677 - DNA, 20 bp, Artificial
  20-mer unique DNA sequence
gatgaaccggtcgtcgcttg

SEQ ID NO: 3678 - DNA, 20 bp, Artificial
  20-mer unique DNA sequence
aggctcacccgaacgcgaat

SEQ ID NO: 3679 - DNA, 20 bp, Artificial
  20-mer unique DNA sequence
attctacgtagcggggccgg

SEQ ID NO: 3680 - DNA, 20 bp, Artificial
  20-mer unique DNA sequence
ccgcagcaacaacagccatc

SEQ ID NO: 3681 - DNA, 20 bp, Artificial
  20-mer unique DNA sequence
ccccgaaggcagcaggatga

SEQ ID NO: 3682 - DNA, 20 bp, Artificial
  20-mer unique DNA sequence
gtgccatacacaagacgggc

SEQ ID NO: 3683 - DNA, 20 bp, Artificial
  20-mer unique DNA sequence
aagctagtgaccggccccca

SEQ ID NO: 3684 - DNA, 20 bp, Artificial
  20-mer unique DNA sequence
tcgatggtcacgccacttgt

SEQ ID NO: 3685 - DNA, 20 bp, Artificial
  20-mer unique DNA sequence
gtaggtttcggctccgggaa

SEQ ID NO: 3686 - DNA, 20 bp, Artificial
  20-mer unique DNA sequence
ctgagaagtatgccgcggga

SEQ ID NO: 3687 - DNA, 20 bp, Artificial
  20-mer unique DNA sequence
accgtttcgcccattcttgc

SEQ ID NO: 3688 - DNA, 20 bp, Artificial
  20-mer unique DNA sequence
tcaataaggtcccgcccccc

SEQ ID NO: 3689 - DNA, 20 bp, Artificial
  20-mer unique DNA sequence
ccccctcctgccgaacaatc

SEQ ID NO: 3690 - DNA, 20 bp, Artificial
  20-mer unique DNA sequence
aggcagcgacacatcaccgg

SEQ ID NO: 3691 - DNA, 20 bp, Artificial
  20-mer unique DNA sequence
ttttcgtgtgtggggggtgc

SEQ ID NO: 3692 - DNA, 20 bp, Artificial
  20-mer unique DNA sequence
tattgactgcccgctgccgg

SEQ ID NO: 3693 - DNA, 20 bp, Artificial
  20-mer unique DNA sequence
ccccgcatccaggccacata

SEQ ID NO: 3694 - DNA, 20 bp, Artificial
  20-mer unique DNA sequence
ccatgttcgacgcccctgcg

SEQ ID NO: 3695 - DNA, 20 bp, Artificial
  20-mer unique DNA sequence
cgatgggttggacgagcagt

SEQ ID NO: 3696 - DNA, 20 bp, Artificial
  20-mer unique DNA sequence
gacccggaaagcgtctgtgc

SEQ ID NO: 3697 - DNA, 20 bp, Artificial
  20-mer unique DNA sequence
cgggtcgctcttcaggtgca

SEQ ID NO: 3698 - DNA, 20 bp, Artificial
  20-mer unique DNA sequence
acaacgacctgacccacgca

SEQ ID NO: 3699 - DNA, 20 bp, Artificial
  20-mer unique DNA sequence
aacacaggcaccacggtagg

SEQ ID NO: 3700 - DNA, 20 bp, Artificial
  20-mer unique DNA sequence
gcgtgaggatgtggagcgga

SEQ ID NO: 3701 - DNA, 20 bp, Artificial
  20-mer unique DNA sequence
tcccggcgagcaaacacaca

SEQ ID NO: 3702 - DNA, 20 bp, Artificial
  20-mer unique DNA sequence
ccgcaaccacacaaacgctg

SEQ ID NO: 3703 - DNA, 20 bp, Artificial
  20-mer unique DNA sequence
acaaggggtaaatcgggggg

SEQ ID NO: 3704 - DNA, 20 bp, Artificial
  20-mer unique DNA sequence
gctgacccgttctttgcgcg

SEQ ID NO: 3705 - DNA, 20 bp, Artificial
  20-mer unique DNA sequence
cctcaagcgcgtgtcccata

SEQ ID NO: 3706 - DNA, 20 bp, Artificial
  20-mer unique DNA sequence
cgtgggcggcaggtacgttt

SEQ ID NO: 3707 - DNA, 20 bp, Artificial
  20-mer unique DNA sequence
gccgccgcaaatcagctcta

SEQ ID NO: 3708 - DNA, 20 bp, Artificial
  20-mer unique DNA sequence
cgggcggctaagatggtcaa

SEQ ID NO: 3709 - DNA, 20 bp, Artificial
  20-mer unique DNA sequence
cacccctcgccattcgttga

SEQ ID NO: 3710 - DNA, 20 bp, Artificial
  20-mer unique DNA sequence
cgaacctgcgcccacaatca

SEQ ID NO: 3711 - DNA, 20 bp, Artificial
  20-mer unique DNA sequence
gccccaaaatccatagccca

SEQ ID NO: 3712 - DNA, 20 bp, Artificial
  20-mer unique DNA sequence
catgcacgtggcgactcatc

SEQ ID NO: 3713 - DNA, 20 bp, Artificial
  20-mer unique DNA sequence
aaattcccaccgtatcgccg

SEQ ID NO: 3714 - DNA, 20 bp, Artificial
  20-mer unique DNA sequence
tgcgatgacaggttggggag

SEQ ID NO: 3715 - DNA, 20 bp, Artificial
  20-mer unique DNA sequence
agcatgtaccgcgtttgggg

SEQ ID NO: 3716 - DNA, 20 bp, Artificial
  20-mer unique DNA sequence
tgctcgtgggctggactgga

SEQ ID NO: 3717 - DNA, 20 bp, Artificial
  20-mer unique DNA sequence
taacccagcgcgcctaacct

SEQ ID NO: 3718 - DNA, 20 bp, Artificial
  20-mer unique DNA sequence
cgggctcggactgcaggaag

SEQ ID NO: 3719 - DNA, 20 bp, Artificial
  20-mer unique DNA sequence
cggtgccccagtaaaaaggc

SEQ ID NO: 3720 - DNA, 20 bp, Artificial
  20-mer unique DNA sequence
ttctttcccgccccaccgat

SEQ ID NO: 3721 - DNA, 20 bp, Artificial
  20-mer unique DNA sequence
tccttcgccaccaccaccaa

SEQ ID NO: 3722 - DNA, 20 bp, Artificial
  20-mer unique DNA sequence
catcagtcgaacgcaggcgg

SEQ ID NO: 3723 - DNA, 20 bp, Artificial
  20-mer unique DNA sequence
gacagggcaccgatgacacg

SEQ ID NO: 3724 - DNA, 20 bp, Artificial
  20-mer unique DNA sequence
cacccaaccaaccatcgcaa

SEQ ID NO: 3725 - DNA, 20 bp, Artificial
  20-mer unique DNA sequence
agggccgggatagggtgagt

SEQ ID NO: 3726 - DNA, 20 bp, Artificial
  20-mer unique DNA sequence
cgtagggtaaggatgccgcc

SEQ ID NO: 3727 - DNA, 20 bp, Artificial
  20-mer unique DNA sequence
ttaccccgcgctgttgtgca

SEQ ID NO: 3728 - DNA, 20 bp, Artificial
  20-mer unique DNA sequence
gcaaaactccggctgcagct

SEQ ID NO: 3729 - DNA, 20 bp, Artificial
  20-mer unique DNA sequence
gcgacaaaaaccgcctcgga

SEQ ID NO: 3730 - DNA, 20 bp, Artificial
  20-mer unique DNA sequence
gaacccacccccagcacaag

SEQ ID NO: 3731 - DNA, 20 bp, Artificial
  20-mer unique DNA sequence
tcaacccgaaccactccccg

SEQ ID NO: 3732 - DNA, 20 bp, Artificial
  20-mer unique DNA sequence
cgcgcgggttaactgaggtg

SEQ ID NO: 3733 - DNA, 20 bp, Artificial
  20-mer unique DNA sequence
tgcccgataaccgctcccct

SEQ ID NO: 3734 - DNA, 20 bp, Artificial
  20-mer unique DNA sequence
ccacacctgccgattcctcg

SEQ ID NO: 3735 - DNA, 20 bp, Artificial
  20-mer unique DNA sequence
catacacccgacttgcccga

SEQ ID NO: 3736 - DNA, 20 bp, Artificial
  20-mer unique DNA sequence
catccgtgcccttcgttgct

SEQ ID NO: 3737 - DNA, 20 bp, Artificial
  20-mer unique DNA sequence
cgccgaccgatacacaacgc

SEQ ID NO: 3738 - DNA, 20 bp, Artificial
  20-mer unique DNA sequence
accgagggcttggggacacc

SEQ ID NO: 3739 - DNA, 20 bp, Artificial
  20-mer unique DNA sequence
ccgaccccacgatggaaaat

SEQ ID NO: 3740 - DNA, 20 bp, Artificial
  20-mer unique DNA sequence
attctttggcttgcgaggcg

SEQ ID NO: 3741 - DNA, 20 bp, Artificial
  20-mer unique DNA sequence
cgccacctccagccgaaact

SEQ ID NO: 3742 - DNA, 20 bp, Artificial
  20-mer unique DNA sequence
gcactggcgtgtaagcagac

SEQ ID NO: 3743 - DNA, 20 bp, Artificial
  20-mer unique DNA sequence
acttggagtgccccgaagag

SEQ ID NO: 3744 - DNA, 20 bp, Artificial
  20-mer unique DNA sequence
aaagcggggcaggactacgg

SEQ ID NO: 3745 - DNA, 20 bp, Artificial
  20-mer unique DNA sequence
cgcagggtgaggggaggagg

SEQ ID NO: 3746 - DNA, 20 bp, Artificial
  20-mer unique DNA sequence
gggcacgggggggataagtc

SEQ ID NO: 3747 - DNA, 20 bp, Artificial
  20-mer unique DNA sequence
cactccgcacctccgttcac

SEQ ID NO: 3748 - DNA, 20 bp, Artificial
  20-mer unique DNA sequence
gaatcgggaagggcgggaaa

SEQ ID NO: 3749 - DNA, 20 bp, Artificial
  20-mer unique DNA sequence
tgggcaggcggtaggggttc

SEQ ID NO: 3750 - DNA, 20 bp, Artificial
  20-mer unique DNA sequence
cagcccctaacgaagccacc

SEQ ID NO: 3751 - DNA, 20 bp, Artificial
  20-mer unique DNA sequence
tccccacccctcagtccaag

SEQ ID NO: 3752 - DNA, 20 bp, Artificial
  20-mer unique DNA sequence
ccaggtgcgcgggttgacat

SEQ ID NO: 3753 - DNA, 20 bp, Artificial
  20-mer unique DNA sequence
aatacgttccggcgacccct

SEQ ID NO: 3754 - DNA, 20 bp, Artificial
  20-mer unique DNA sequence
ccaaggggggcgattcaaca

SEQ ID NO: 3755 - DNA, 20 bp, Artificial
  20-mer unique DNA sequence
tgggccttttccggtctggg

SEQ ID NO: 3756 - DNA, 20 bp, Artificial
  20-mer unique DNA sequence
gttggcgggtcttcgtctcg

SEQ ID NO: 3757 - DNA, 20 bp, Artificial
  20-mer unique DNA sequence
cctaccgcgattggccagtt

SEQ ID NO: 3758 - DNA, 20 bp, Artificial
  20-mer unique DNA sequence
cgggcaccgagtgtagtgtt

SEQ ID NO: 3759 - DNA, 20 bp, Artificial
  20-mer unique DNA sequence
gcgcagggccaaaacattct

SEQ ID NO: 3760 - DNA, 20 bp, Artificial
  20-mer unique DNA sequence
agcgcgcgaggcaaaaagtg

SEQ ID NO: 3761 - DNA, 20 bp, Artificial
  20-mer unique DNA sequence
gtcgtggaggtgccgtgatg

SEQ ID NO: 3762 - DNA, 20 bp, Artificial
  20-mer unique DNA sequence
tggcatgcgcgggaactttc

SEQ ID NO: 3763 - DNA, 20 bp, Artificial
  20-mer unique DNA sequence
gccctcttggcggatcaatc

SEQ ID NO: 3764 - DNA, 20 bp, Artificial
  20-mer unique DNA sequence
cagcgtgcggcctcaatcta

SEQ ID NO: 3765 - DNA, 20 bp, Artificial
  20-mer unique DNA sequence
ggccaaaccgcactccattt

SEQ ID NO: 3766 - DNA, 20 bp, Artificial
  20-mer unique DNA sequence
tgggtagcgtgtgtggcgtt

SEQ ID NO: 3767 - DNA, 20 bp, Artificial
  20-mer unique DNA sequence
ccacctcccgcacgacttca

SEQ ID NO: 3768 - DNA, 20 bp, Artificial
  20-mer unique DNA sequence
cagggtgtgagccaatcgaa

SEQ ID NO: 3769 - DNA, 20 bp, Artificial
  20-mer unique DNA sequence
agggcggacttcttgggcta

SEQ ID NO: 3770 - DNA, 20 bp, Artificial
  20-mer unique DNA sequence
caccacgaccgaaccacgca

SEQ ID NO: 3771 - DNA, 20 bp, Artificial
  20-mer unique DNA sequence
tcccctcgtgtttgcttgcg

SEQ ID NO: 3772 - DNA, 20 bp, Artificial
  20-mer unique DNA sequence
tcggaaagcggcggtgaata

SEQ ID NO: 3773 - DNA, 20 bp, Artificial
  20-mer unique DNA sequence
atcaacccccgtcaggccaa

SEQ ID NO: 3774 - DNA, 20 bp, Artificial
  20-mer unique DNA sequence
aacggaaagaaacgcgacgg

SEQ ID NO: 3775 - DNA, 20 bp, Artificial
  20-mer unique DNA sequence
gctcgctactgccctctcgc

SEQ ID NO: 3776 - DNA, 20 bp, Artificial
  20-mer unique DNA sequence
ttgccatccagtccatccgg

SEQ ID NO: 3777 - DNA, 20 bp, Artificial
  20-mer unique DNA sequence
tcctcgccagcctcctgaac

SEQ ID NO: 3778 - DNA, 20 bp, Artificial
  20-mer unique DNA sequence
aggcaaccggcgagcatcac

SEQ ID NO: 3779 - DNA, 20 bp, Artificial
  20-mer unique DNA sequence
tgcggaccataagcgggttg

SEQ ID NO: 3780 - DNA, 20 bp, Artificial
  20-mer unique DNA sequence
atacggcagatgcgtacccg

SEQ ID NO: 3781 - DNA, 20 bp, Artificial
  20-mer unique DNA sequence
ggtgcattggggttaggggg

SEQ ID NO: 3782 - DNA, 20 bp, Artificial
  20-mer unique DNA sequence
cccggcgtcaacttttcctg

SEQ ID NO: 3783 - DNA, 20 bp, Artificial
  20-mer unique DNA sequence
cgaccccctaagatgacgcg

SEQ ID NO: 3784 - DNA, 20 bp, Artificial
  20-mer unique DNA sequence
aaacgccccctcacttcccg

SEQ ID NO: 3785 - DNA, 20 bp, Artificial
  20-mer unique DNA sequence
agaatttgaagcgcgggacg

SEQ ID NO: 3786 - DNA, 20 bp, Artificial
  20-mer unique DNA sequence
ccattcgcacgagtcctcca

SEQ ID NO: 3787 - DNA, 20 bp, Artificial
  20-mer unique DNA sequence
gcaaaggcgcatcacctcag

SEQ ID NO: 3788 - DNA, 20 bp, Artificial
  20-mer unique DNA sequence
gccaagtcaaaccgccgtcc

SEQ ID NO: 3789 - DNA, 20 bp, Artificial
  20-mer unique DNA sequence
ttacctccgtgacctgcccc

SEQ ID NO: 3790 - DNA, 20 bp, Artificial
  20-mer unique DNA sequence
aaaccatgcggcctcaaccc

SEQ ID NO: 3791 - DNA, 20 bp, Artificial
  20-mer unique DNA sequence
ccccggacacctacgagccc

SEQ ID NO: 3792 - DNA, 20 bp, Artificial
  20-mer unique DNA sequence
tggactgaaccgatcgctcg

SEQ ID NO: 3793 - DNA, 20 bp, Artificial
  20-mer unique DNA sequence
aaagccgcgcctaatgaacg

SEQ ID NO: 3794 - DNA, 20 bp, Artificial
  20-mer unique DNA sequence
agggctgtgccgggagtggt

SEQ ID NO: 3795 - DNA, 20 bp, Artificial
  20-mer unique DNA sequence
ccctcaccaccgccgtaatg

SEQ ID NO: 3796 - DNA, 20 bp, Artificial
  20-mer unique DNA sequence
aggaggtggggcgagacatg

SEQ ID NO: 3797 - DNA, 20 bp, Artificial
  20-mer unique DNA sequence
tgcccccacataccctcaca

SEQ ID NO: 3798 - DNA, 20 bp, Artificial
  20-mer unique DNA sequence
cgttcgtcccttagcgctcg

SEQ ID NO: 3799 - DNA, 20 bp, Artificial
  20-mer unique DNA sequence
gcccggcctcagcaacacac

SEQ ID NO: 3800 - DNA, 20 bp, Artificial
  20-mer unique DNA sequence
ccggcaagcattggatggtg

SEQ ID NO: 3801 - DNA, 20 bp, Artificial
  20-mer unique DNA sequence
agagggctccggttgaaggg

SEQ ID NO: 3802 - DNA, 20 bp, Artificial
  20-mer unique DNA sequence
gcgtgggggagtttggcatt

SEQ ID NO: 3803 - DNA, 20 bp, Artificial
  20-mer unique DNA sequence
ctaaagccaccaacccccgc

SEQ ID NO: 3804 - DNA, 20 bp, Artificial
  20-mer unique DNA sequence
agcttattcgcgccctcccc

SEQ ID NO: 3805 - DNA, 20 bp, Artificial
  20-mer unique DNA sequence
gcccatccgtccttgcaatc

SEQ ID NO: 3806 - DNA, 20 bp, Artificial
  20-mer unique DNA sequence
cgcacgaactaacgccccca

SEQ ID NO: 3807 - DNA, 20 bp, Artificial
  20-mer unique DNA sequence
ccagttccgggggccttatc

SEQ ID NO: 3808 - DNA, 20 bp, Artificial
  20-mer unique DNA sequence
gttaatcgggcagacgggga

SEQ ID NO: 3809 - DNA, 20 bp, Artificial
  20-mer unique DNA sequence
acccgttctccgtctgccaa

SEQ ID NO: 3810 - DNA, 20 bp, Artificial
  20-mer unique DNA sequence
gcagccgcaccccattaagg

SEQ ID NO: 3811 - DNA, 20 bp, Artificial
  20-mer unique DNA sequence
cggccacgagggaagaacgg

SEQ ID NO: 3812 - DNA, 20 bp, Artificial
  20-mer unique DNA sequence
ggggtaccaggcagcgattc

SEQ ID NO: 3813 - DNA, 20 bp, Artificial
  20-mer unique DNA sequence
atgcgggcagggaaaagcag

SEQ ID NO: 3814 - DNA, 20 bp, Artificial
  20-mer unique DNA sequence
ttcgcgaactgtcggagcac

SEQ ID NO: 3815 - DNA, 20 bp, Artificial
  20-mer unique DNA sequence
atagccacggctcactaggc

SEQ ID NO: 3816 - DNA, 20 bp, Artificial
  20-mer unique DNA sequence
ccatctgcgcccttccaaca

SEQ ID NO: 3817 - DNA, 20 bp, Artificial
  20-mer unique DNA sequence
acggccgcgctgacaactat

SEQ ID NO: 3818 - DNA, 20 bp, Artificial
  20-mer unique DNA sequence
cacgcaatccctgagtccga

SEQ ID NO: 3819 - DNA, 20 bp, Artificial
  20-mer unique DNA sequence
cttcgcggaggggttaggta

SEQ ID NO: 3820 - DNA, 20 bp, Artificial
  20-mer unique DNA sequence
tttagtcccgccaacgtccg

SEQ ID NO: 3821 - DNA, 20 bp, Artificial
  20-mer unique DNA sequence
aatcagccgtgacccgtagc

SEQ ID NO: 3822 - DNA, 20 bp, Artificial
  20-mer unique DNA sequence
cagcgtggttttcggcggtc

SEQ ID NO: 3823 - DNA, 20 bp, Artificial
  20-mer unique DNA sequence
ttgtctgccggcccccattt

SEQ ID NO: 3824 - DNA, 20 bp, Artificial
  20-mer unique DNA sequence
aacgggcggcgagacactca

SEQ ID NO: 3825 - DNA, 20 bp, Artificial
  20-mer unique DNA sequence
tgccgggttggtgcttggtc

SEQ ID NO: 3826 - DNA, 20 bp, Artificial
  20-mer unique DNA sequence
gtgagcctggtgtgttgcgg

SEQ ID NO: 3827 - DNA, 20 bp, Artificial
  20-mer unique DNA sequence
tgcctctcctgcctcacccc

SEQ ID NO: 3828 - DNA, 20 bp, Artificial
  20-mer unique DNA sequence
gcggccgacgaaaccttagc

SEQ ID NO: 3829 - DNA, 20 bp, Artificial
  20-mer unique DNA sequence
agggcaggcacgacgagagg

SEQ ID NO: 3830 - DNA, 20 bp, Artificial
  20-mer unique DNA sequence
gcccccgtctgtccgataaa

SEQ ID NO: 3831 - DNA, 20 bp, Artificial
  20-mer unique DNA sequence
ggatatcgatgcgggcgtgg

SEQ ID NO: 3832 - DNA, 20 bp, Artificial
  20-mer unique DNA sequence
gttcgcaggtgggcttcgct

SEQ ID NO: 3833 - DNA, 20 bp, Artificial
  20-mer unique DNA sequence
ccccataacaaggcgaagcc

SEQ ID NO: 3834 - DNA, 20 bp, Artificial
  20-mer unique DNA sequence
aacccgatacgctgtcccgg

SEQ ID NO: 3835 - DNA, 20 bp, Artificial
  20-mer unique DNA sequence
ctgcaaacgcggggctaaca

SEQ ID NO: 3836 - DNA, 20 bp, Artificial
  20-mer unique DNA sequence
ggcaaaagatccgcacacgg

SEQ ID NO: 3837 - DNA, 20 bp, Artificial
  20-mer unique DNA sequence
tgccgtgccgtcatctctga

SEQ ID NO: 3838 - DNA, 20 bp, Artificial
  20-mer unique DNA sequence
gatagcggaattgcgcaggg

SEQ ID NO: 3839 - DNA, 20 bp, Artificial
  20-mer unique DNA sequence
acccgttggcggaagagtca

SEQ ID NO: 3840 - DNA, 20 bp, Artificial
  20-mer unique DNA sequence
cgcacgccccagtcaagaac

SEQ ID NO: 3841 - DNA, 20 bp, Artificial
  20-mer unique DNA sequence
ggggcagagggggttagggc

SEQ ID NO: 3842 - DNA, 20 bp, Artificial
  20-mer unique DNA sequence
tgtgtgagggtgggtgcgga

SEQ ID NO: 3843 - DNA, 20 bp, Artificial
  20-mer unique DNA sequence
actttgccccacgaccgaaa

SEQ ID NO: 3844 - DNA, 20 bp, Artificial
  20-mer unique DNA sequence
gttgcgcatgtgacagctcc

SEQ ID NO: 3845 - DNA, 20 bp, Artificial
  20-mer unique DNA sequence
cgcgctcagcctagagtaca

SEQ ID NO: 3846 - DNA, 20 bp, Artificial
  20-mer unique DNA sequence
atgcgcacctaggtcagtcc

SEQ ID NO: 3847 - DNA, 20 bp, Artificial
  20-mer unique DNA sequence
aacggtcggtcccggatttt

SEQ ID NO: 3848 - DNA, 20 bp, Artificial
  20-mer unique DNA sequence
gccatggggagccgggaata

SEQ ID NO: 3849 - DNA, 20 bp, Artificial
  20-mer unique DNA sequence
gccggtgtttgcaggatggc

SEQ ID NO: 3850 - DNA, 20 bp, Artificial
  20-mer unique DNA sequence
catgcgccaaccctctgtgt

SEQ ID NO: 3851 - DNA, 20 bp, Artificial
  20-mer unique DNA sequence
cgcgggaacgaagcctggat

SEQ ID NO: 3852 - DNA, 20 bp, Artificial
  20-mer unique DNA sequence
aacccacccaccacaaggca

SEQ ID NO: 3853 - DNA, 20 bp, Artificial
  20-mer unique DNA sequence
aacgaagtggcgaggcgaga

SEQ ID NO: 3854 - DNA, 20 bp, Artificial
  20-mer unique DNA sequence
atccgtccgctgcccaactt

SEQ ID NO: 3855 - DNA, 20 bp, Artificial
  20-mer unique DNA sequence
aaaatggcggcaagacggtt

SEQ ID NO: 3856 - DNA, 20 bp, Artificial
  20-mer unique DNA sequence
gacaatcgcgagggaaacgg

SEQ ID NO: 3857 - DNA, 20 bp, Artificial
  20-mer unique DNA sequence
tggtgggttgacgtcgagcg

SEQ ID NO: 3858 - DNA, 20 bp, Artificial
  20-mer unique DNA sequence
cctaggccggcgttcttgct

SEQ ID NO: 3859 - DNA, 20 bp, Artificial
  20-mer unique DNA sequence
tgcgttggcgtaggtgtcgg

SEQ ID NO: 3860 - DNA, 20 bp, Artificial
  20-mer unique DNA sequence
actctgaccgccccccgact

SEQ ID NO: 3861 - DNA, 20 bp, Artificial
  20-mer unique DNA sequence
tcgtccagagttcaccgccc

SEQ ID NO: 3862 - DNA, 20 bp, Artificial
  20-mer unique DNA sequence
tgagatgggggaacgaggct

SEQ ID NO: 3863 - DNA, 20 bp, Artificial
  20-mer unique DNA sequence
tgctgtgggggcgtattcca

SEQ ID NO: 3864 - DNA, 20 bp, Artificial
  20-mer unique DNA sequence
ccgcacccatacaacgccct

SEQ ID NO: 3865 - DNA, 20 bp, Artificial
  20-mer unique DNA sequence
tcccacaatccgacacgccc

SEQ ID NO: 3866 - DNA, 20 bp, Artificial
  20-mer unique DNA sequence
ctacgcgcgcaaggatggat

SEQ ID NO: 3867 - DNA, 20 bp, Artificial
  20-mer unique DNA sequence
tcgccgcaaatcgtccttga

SEQ ID NO: 3868 - DNA, 20 bp, Artificial
  20-mer unique DNA sequence
ccagtccaccaccgcaggaa

SEQ ID NO: 3869 - DNA, 20 bp, Artificial
  20-mer unique DNA sequence
tggacaacctaccgcagcgc

SEQ ID NO: 3870 - DNA, 20 bp, Artificial
  20-mer unique DNA sequence
gcccctcaaaccacgatcgc

SEQ ID NO: 3871 - DNA, 20 bp, Artificial
  20-mer unique DNA sequence
tatccccgccctcgtcccat

SEQ ID NO: 3872 - DNA, 20 bp, Artificial
  20-mer unique DNA sequence
gcagatggaggaacgagggg

SEQ ID NO: 3873 - DNA, 20 bp, Artificial
  20-mer unique DNA sequence
agcaggtctaaccggtccgt

SEQ ID NO: 3874 - DNA, 20 bp, Artificial
  20-mer unique DNA sequence
cctgtattgcgcgttccggg

SEQ ID NO: 3875 - DNA, 20 bp, Artificial
  20-mer unique DNA sequence
aaccacgcgatccaccaacg

SEQ ID NO: 3876 - DNA, 20 bp, Artificial
  20-mer unique DNA sequence
acgccctagaccctcgccac

SEQ ID NO: 3877 - DNA, 20 bp, Artificial
  20-mer unique DNA sequence
ggctgcgtaatccgtgcgtg

SEQ ID NO: 3878 - DNA, 20 bp, Artificial
  20-mer unique DNA sequence
agaaacgtcaaccggctccg

SEQ ID NO: 3879 - DNA, 20 bp, Artificial
  20-mer unique DNA sequence
ccgggccgttagcattgaga

SEQ ID NO: 3880 - DNA, 20 bp, Artificial
  20-mer unique DNA sequence
accccaaacggcaacctcag

SEQ ID NO: 3881 - DNA, 20 bp, Artificial
  20-mer unique DNA sequence
tatgaacgggggcgggagga

SEQ ID NO: 3882 - DNA, 20 bp, Artificial
  20-mer unique DNA sequence
aaacacccgacccccagcat

SEQ ID NO: 3883 - DNA, 20 bp, Artificial
  20-mer unique DNA sequence
ataacgcattgggccgggaa

SEQ ID NO: 3884 - DNA, 20 bp, Artificial
  20-mer unique DNA sequence
tggccccttactccccgcag

SEQ ID NO: 3885 - DNA, 20 bp, Artificial
  20-mer unique DNA sequence
ggaggcacacgcatggggta

SEQ ID NO: 3886 - DNA, 20 bp, Artificial
  20-mer unique DNA sequence
ggggaaggcgctacgtcaac

SEQ ID NO: 3887 - DNA, 20 bp, Artificial
  20-mer unique DNA sequence
aaggtgcatttgggcggtga

SEQ ID NO: 3888 - DNA, 20 bp, Artificial
  20-mer unique DNA sequence
tccaagggttccgtccacca

SEQ ID NO: 3889 - DNA, 20 bp, Artificial
  20-mer unique DNA sequence
tggttaggcgtggagtggcg

SEQ ID NO: 3890 - DNA, 20 bp, Artificial
  20-mer unique DNA sequence
taagggagtgatcgggcggg

SEQ ID NO: 3891 - DNA, 20 bp, Artificial
  20-mer unique DNA sequence
tggggcatgcggatcgttat

SEQ ID NO: 3892 - DNA, 20 bp, Artificial
  20-mer unique DNA sequence
cgtttggcccttggtttcga

SEQ ID NO: 3893 - DNA, 20 bp, Artificial
  20-mer unique DNA sequence
gagccggcaccacaatacca

SEQ ID NO: 3894 - DNA, 20 bp, Artificial
  20-mer unique DNA sequence
ctaagggtctggtggcgtgc

SEQ ID NO: 3895 - DNA, 20 bp, Artificial
  20-mer unique DNA sequence
ggtccccgaaattgcacgtc

SEQ ID NO: 3896 - DNA, 20 bp, Artificial
  20-mer unique DNA sequence
actttcaccaacccggccag

SEQ ID NO: 3897 - DNA, 20 bp, Artificial
  20-mer unique DNA sequence
taaggttctatcgcccacgt

SEQ ID NO: 3898 - DNA, 20 bp, Artificial
  20-mer unique DNA sequence
ttcctgcatgttggcgctca

SEQ ID NO: 3899 - DNA, 20 bp, Artificial
  20-mer unique DNA sequence
acggcccctagtccctcgca

SEQ ID NO: 3900 - DNA, 20 bp, Artificial
  20-mer unique DNA sequence
ggggcgtgcttgttttacgg

SEQ ID NO: 3901 - DNA, 20 bp, Artificial
  20-mer unique DNA sequence
ggggggcagaagacaaggga

SEQ ID NO: 3902 - DNA, 20 bp, Artificial
  20-mer unique DNA sequence
gtttttcctccccgcctcct

SEQ ID NO: 3903 - DNA, 20 bp, Artificial
  20-mer unique DNA sequence
accatcgaagcaccgcgacc

SEQ ID NO: 3904 - DNA, 20 bp, Artificial
  20-mer unique DNA sequence
gcgtttggtctttgggcagg

SEQ ID NO: 3905 - DNA, 20 bp, Artificial
  20-mer unique DNA sequence
ctggctggtcgggtgttcgc

SEQ ID NO: 3906 - DNA, 20 bp, Artificial
  20-mer unique DNA sequence
ccccgtggattggcgtatgt

SEQ ID NO: 3907 - DNA, 20 bp, Artificial
  20-mer unique DNA sequence
cggagctgcgatttgtggtg

SEQ ID NO: 3908 - DNA, 20 bp, Artificial
  20-mer unique DNA sequence
tgaaggctgaaaccggggtc

SEQ ID NO: 3909 - DNA, 20 bp, Artificial
  20-mer unique DNA sequence
ttgtcgcatgtcctccccac

SEQ ID NO: 3910 - DNA, 20 bp, Artificial
  20-mer unique DNA sequence
aagcaacgccggaccaagca

SEQ ID NO: 3911 - DNA, 20 bp, Artificial
  20-mer unique DNA sequence
agaggttttggccggcgtgt

SEQ ID NO: 3912 - DNA, 20 bp, Artificial
  20-mer unique DNA sequence
gagctggactgcagaccgtt

SEQ ID NO: 3913 - DNA, 20 bp, Artificial
  20-mer unique DNA sequence
tcaacggaccgaacgtgcca

SEQ ID NO: 3914 - DNA, 20 bp, Artificial
  20-mer unique DNA sequence
tattttaccacgcctccgca

SEQ ID NO: 3915 - DNA, 20 bp, Artificial
  20-mer unique DNA sequence
ttttgggggttttgacgcgg

SEQ ID NO: 3916 - DNA, 20 bp, Artificial
  20-mer unique DNA sequence
ccgcatcgacaagcccaagg

SEQ ID NO: 3917 - DNA, 20 bp, Artificial
  20-mer unique DNA sequence
tgggaccctttgggggaaat

SEQ ID NO: 3918 - DNA, 20 bp, Artificial
  20-mer unique DNA sequence
tggtattcccgcgggttttc

SEQ ID NO: 3919 - DNA, 20 bp, Artificial
  20-mer unique DNA sequence
taggatgatgtcgccccggt

SEQ ID NO: 3920 - DNA, 20 bp, Artificial
  20-mer unique DNA sequence
cattccacccagaagcccga

SEQ ID NO: 3921 - DNA, 20 bp, Artificial
  20-mer unique DNA sequence
cctctctggcacgtcgttca

SEQ ID NO: 3922 - DNA, 20 bp, Artificial
  20-mer unique DNA sequence
agacgtctcgactctgctgc

SEQ ID NO: 3923 - DNA, 20 bp, Artificial
  20-mer unique DNA sequence
cacgcccggctagctgtaat

SEQ ID NO: 3924 - DNA, 20 bp, Artificial
  20-mer unique DNA sequence
ccgttgctctattgcgtgcg

SEQ ID NO: 3925 - DNA, 20 bp, Artificial
  20-mer unique DNA sequence
cccagctcgttctcgcccta

SEQ ID NO: 3926 - DNA, 20 bp, Artificial
  20-mer unique DNA sequence
ttctacaaccaatgccgccg

SEQ ID NO: 3927 - DNA, 20 bp, Artificial
  20-mer unique DNA sequence
gccccctgtccgccgtaaaa

SEQ ID NO: 3928 - DNA, 20 bp, Artificial
  20-mer unique DNA sequence
cccccccttttcccagatcc

SEQ ID NO: 3929 - DNA, 20 bp, Artificial
  20-mer unique DNA sequence
tcagagggcggtcaggatgc

SEQ ID NO: 3930 - DNA, 20 bp, Artificial
  20-mer unique DNA sequence
cacacgcattcctccgctcc

SEQ ID NO: 3931 - DNA, 20 bp, Artificial
  20-mer unique DNA sequence
tcgcccaagccaagcacctt

SEQ ID NO: 3932 - DNA, 20 bp, Artificial
  20-mer unique DNA sequence
caccccatggatttcgcgaa

SEQ ID NO: 3933 - DNA, 20 bp, Artificial
  20-mer unique DNA sequence
gtaacacggcggagtcggca

SEQ ID NO: 3934 - DNA, 20 bp, Artificial
  20-mer unique DNA sequence
tcattgccccctagtccgct

SEQ ID NO: 3935 - DNA, 20 bp, Artificial
  20-mer unique DNA sequence
tgtacaatgtgcggcgggag

SEQ ID NO: 3936 - DNA, 20 bp, Artificial
  20-mer unique DNA sequence
cagccttgccgtcgtatccc

SEQ ID NO: 3937 - DNA, 20 bp, Artificial
  20-mer unique DNA sequence
caaccgccgtcctcccttta

SEQ ID NO: 3938 - DNA, 20 bp, Artificial
  20-mer unique DNA sequence
gtagttggccgcgaccccgt

SEQ ID NO: 3939 - DNA, 20 bp, Artificial
  20-mer unique DNA sequence
gagggggtgacgcatgaggc

SEQ ID NO: 3940 - DNA, 20 bp, Artificial
  20-mer unique DNA sequence
tgaggacgaggtgcggaaca

SEQ ID NO: 3941 - DNA, 20 bp, Artificial
  20-mer unique DNA sequence
gcagtcggggggtggtaggt

SEQ ID NO: 3942 - DNA, 20 bp, Artificial
  20-mer unique DNA sequence
cccggtcctcaatcagcgct

SEQ ID NO: 3943 - DNA, 20 bp, Artificial
  20-mer unique DNA sequence
cagtggcgtgggagaggagc

SEQ ID NO: 3944 - DNA, 20 bp, Artificial
  20-mer unique DNA sequence
cccgccctaacatcccgacc

SEQ ID NO: 3945 - DNA, 20 bp, Artificial
  20-mer unique DNA sequence
gcccctgtctccttcgcaac

SEQ ID NO: 3946 - DNA, 20 bp, Artificial
  20-mer unique DNA sequence
ttagttggggagtcgcggat

SEQ ID NO: 3947 - DNA, 20 bp, Artificial
  20-mer unique DNA sequence
ggacctacgccggctttttg

SEQ ID NO: 3948 - DNA, 20 bp, Artificial
  20-mer unique DNA sequence
tggagcttggttcagggggt

SEQ ID NO: 3949 - DNA, 20 bp, Artificial
  20-mer unique DNA sequence
cgcacccagctcctttccac

SEQ ID NO: 3950 - DNA, 20 bp, Artificial
  20-mer unique DNA sequence
acatgggagggggtttgcgt

SEQ ID NO: 3951 - DNA, 20 bp, Artificial
  20-mer unique DNA sequence
agtggttttggggttgccgg

SEQ ID NO: 3952 - DNA, 20 bp, Artificial
  20-mer unique DNA sequence
gcaccaccttccgcccatgt

SEQ ID NO: 3953 - DNA, 20 bp, Artificial
  20-mer unique DNA sequence
tagccgagcggtaatcgtgc

SEQ ID NO: 3954 - DNA, 20 bp, Artificial
  20-mer unique DNA sequence
ccttcccgcacaaatctccg

SEQ ID NO: 3955 - DNA, 20 bp, Artificial
  20-mer unique DNA sequence
gaggctgtattgtgcggcgg

SEQ ID NO: 3956 - DNA, 20 bp, Artificial
  20-mer unique DNA sequence
acgtcgccggatttgagccc

SEQ ID NO: 3957 - DNA, 20 bp, Artificial
  20-mer unique DNA sequence
taacccgccactagctcgcc

SEQ ID NO: 3958 - DNA, 20 bp, Artificial
  20-mer unique DNA sequence
cccccgagcgatcaagccat

SEQ ID NO: 3959 - DNA, 20 bp, Artificial
  20-mer unique DNA sequence
ttgactcccctctcgcgcgt

SEQ ID NO: 3960 - DNA, 20 bp, Artificial
  20-mer unique DNA sequence
acgaccgacccacacccact

SEQ ID NO: 3961 - DNA, 20 bp, Artificial
  20-mer unique DNA sequence
gcagacgcctcaaccccatc

SEQ ID NO: 3962 - DNA, 20 bp, Artificial
  20-mer unique DNA sequence
tagggtcgtagcagcgttgg

SEQ ID NO: 3963 - DNA, 20 bp, Artificial
  20-mer unique DNA sequence
accaaaacaggggcgggagg

SEQ ID NO: 3964 - DNA, 20 bp, Artificial
  20-mer unique DNA sequence
ttcacccgcccctatcattc

SEQ ID NO: 3965 - DNA, 20 bp, Artificial
  20-mer unique DNA sequence
ttcctgccgacccttgctct

SEQ ID NO: 3966 - DNA, 20 bp, Artificial
  20-mer unique DNA sequence
ctcccgacgcacaggtttcc

SEQ ID NO: 3967 - DNA, 20 bp, Artificial
  20-mer unique DNA sequence
atccacgggcgccagacaat

SEQ ID NO: 3968 - DNA, 20 bp, Artificial
  20-mer unique DNA sequence
ggctgttttggcgcatcttg

SEQ ID NO: 3969 - DNA, 20 bp, Artificial
  20-mer unique DNA sequence
gttcttcccaccaccgcgtt

SEQ ID NO: 3970 - DNA, 20 bp, Artificial
  20-mer unique DNA sequence
agggaggcttgggcggtaac

SEQ ID NO: 3971 - DNA, 20 bp, Artificial
  20-mer unique DNA sequence
cagcacagggtcaacgggcg

SEQ ID NO: 3972 - DNA, 20 bp, Artificial
  20-mer unique DNA sequence
ggtgtggaaggtggaggcgt

SEQ ID NO: 3973 - DNA, 20 bp, Artificial
  20-mer unique DNA sequence
taagttgggttggcgcgtca

SEQ ID NO: 3974 - DNA, 20 bp, Artificial
  20-mer unique DNA sequence
attcgcgtgacctctgcgag

SEQ ID NO: 3975 - DNA, 20 bp, Artificial
  20-mer unique DNA sequence
ataaatcggtccggcggagg

SEQ ID NO: 3976 - DNA, 20 bp, Artificial
  20-mer unique DNA sequence
cacgggggtagctcggggta

SEQ ID NO: 3977 - DNA, 20 bp, Artificial
  20-mer unique DNA sequence
tcaaggacgctgggactcgg

SEQ ID NO: 3978 - DNA, 20 bp, Artificial
  20-mer unique DNA sequence
catgcgtgacggaagaggga

SEQ ID NO: 3979 - DNA, 20 bp, Artificial
  20-mer unique DNA sequence
cctgtagcggcgaatgtcca

SEQ ID NO: 3980 - DNA, 20 bp, Artificial
  20-mer unique DNA sequence
gcgatctagcgggtagctgt

SEQ ID NO: 3981 - DNA, 20 bp, Artificial
  20-mer unique DNA sequence
agcgaccttagagcggtcac

SEQ ID NO: 3982 - DNA, 20 bp, Artificial
  20-mer unique DNA sequence
ggagggcgcaagtttcaggg

SEQ ID NO: 3983 - DNA, 20 bp, Artificial
  20-mer unique DNA sequence
gtgtcatagcctggccggcg

SEQ ID NO: 3984 - DNA, 20 bp, Artificial
  20-mer unique DNA sequence
cccgcctctctctaccgtcg

SEQ ID NO: 3985 - DNA, 20 bp, Artificial
  20-mer unique DNA sequence
cctcttcgtcttcgggtcgc

SEQ ID NO: 3986 - DNA, 20 bp, Artificial
  20-mer unique DNA sequence
ccaccaccctacgcctcgga

SEQ ID NO: 3987 - DNA, 20 bp, Artificial
  20-mer unique DNA sequence
acgtgagggcttggcggtaa

SEQ ID NO: 3988 - DNA, 20 bp, Artificial
  20-mer unique DNA sequence
actgggaggtacacggcgcg

SEQ ID NO: 3989 - DNA, 20 bp, Artificial
  20-mer unique DNA sequence
tgcatatggtggccgtcgtc

SEQ ID NO: 3990 - DNA, 20 bp, Artificial
  20-mer unique DNA sequence
ccgagaggctacgtgctgaa

SEQ ID NO: 3991 - DNA, 20 bp, Artificial
  20-mer unique DNA sequence
gtacccagacggcacgtcat

SEQ ID NO: 3992 - DNA, 20 bp, Artificial
  20-mer unique DNA sequence
gtccggttagcgttggtgca

SEQ ID NO: 3993 - DNA, 20 bp, Artificial
  20-mer unique DNA sequence
ggaggccccgaggttgtacg

SEQ ID NO: 3994 - DNA, 20 bp, Artificial
  20-mer unique DNA sequence
cctgatactggcagccggga

SEQ ID NO: 3995 - DNA, 20 bp, Artificial
  20-mer unique DNA sequence
agcgcgtttacgaggcgatg

SEQ ID NO: 3996 - DNA, 20 bp, Artificial
  20-mer unique DNA sequence
ctgtcatgcgggccaaaacg

SEQ ID NO: 3997 - DNA, 20 bp, Artificial
  20-mer unique DNA sequence
caccgcatgcctcccctcta

SEQ ID NO: 3998 - DNA, 20 bp, Artificial
  20-mer unique DNA sequence
ccatgtcgggtggctgagga

SEQ ID NO: 3999 - DNA, 20 bp, Artificial
  20-mer unique DNA sequence
tcgcatcgctaattcccgct

SEQ ID NO: 4000 - DNA, 20 bp, Artificial
  20-mer unique DNA sequence
tgccctaccgctttcgcgaa

SEQ ID NO: 4001 - DNA, 20 bp, Artificial
  20-mer unique DNA sequence
ggaaggggcgttgactggtc

SEQ ID NO: 4002 - DNA, 20 bp, Artificial
  20-mer unique DNA sequence
cgcaaccgacccctccgacg

SEQ ID NO: 4003 - DNA, 20 bp, Artificial
  20-mer unique DNA sequence
aacggcgaggggagacacac

SEQ ID NO: 4004 - DNA, 20 bp, Artificial
  20-mer unique DNA sequence
cagaactagcgtaacccggg

SEQ ID NO: 4005 - DNA, 20 bp, Artificial
  20-mer unique DNA sequence
aaggcgcggctaagaagtgg

SEQ ID NO: 4006 - DNA, 20 bp, Artificial
  20-mer unique DNA sequence
tgcattcccgccctccaaaa

SEQ ID NO: 4007 - DNA, 20 bp, Artificial
  20-mer unique DNA sequence
gccctccccacccttcagca

SEQ ID NO: 4008 - DNA, 20 bp, Artificial
  20-mer unique DNA sequence
aatgtcggttcggggaggct

SEQ ID NO: 4009 - DNA, 20 bp, Artificial
  20-mer unique DNA sequence
ggcacgatctggggcatacc

SEQ ID NO: 4010 - DNA, 20 bp, Artificial
  20-mer unique DNA sequence
gcggagttcgggcgtgtcaa

SEQ ID NO: 4011 - DNA, 20 bp, Artificial
  20-mer unique DNA sequence
agcgggtgtggtcggagttt

SEQ ID NO: 4012 - DNA, 20 bp, Artificial
  20-mer unique DNA sequence
ccgtcgctctccaccctcct

SEQ ID NO: 4013 - DNA, 20 bp, Artificial
  20-mer unique DNA sequence
ttcccccgccccgagtttaa

SEQ ID NO: 4014 - DNA, 20 bp, Artificial
  20-mer unique DNA sequence
cgatccgggtccatggctta

SEQ ID NO: 4015 - DNA, 20 bp, Artificial
  20-mer unique DNA sequence
gctctttcgtcgtccccgga

SEQ ID NO: 4016 - DNA, 20 bp, Artificial
  20-mer unique DNA sequence
aaatacgccgcactagcctg

SEQ ID NO: 4017 - DNA, 20 bp, Artificial
  20-mer unique DNA sequence
aacggttcctcttcggcggg

SEQ ID NO: 4018 - DNA, 20 bp, Artificial
  20-mer unique DNA sequence
aagctgaggacccttgtcgg

SEQ ID NO: 4019 - DNA, 20 bp, Artificial
  20-mer unique DNA sequence
cggaatgcccaggcgacata

SEQ ID NO: 4020 - DNA, 20 bp, Artificial
  20-mer unique DNA sequence
cgcaggggacacggatcatg

SEQ ID NO: 4021 - DNA, 20 bp, Artificial
  20-mer unique DNA sequence
tagtgggggcagaccggagt

SEQ ID NO: 4022 - DNA, 20 bp, Artificial
  20-mer unique DNA sequence
aagccaatcgaaggccctgc

SEQ ID NO: 4023 - DNA, 20 bp, Artificial
  20-mer unique DNA sequence
caaccgcagacgcagcaaag

SEQ ID NO: 4024 - DNA, 20 bp, Artificial
  20-mer unique DNA sequence
gcaggcaccctagacgcaat

SEQ ID NO: 4025 - DNA, 20 bp, Artificial
  20-mer unique DNA sequence
ttatagcacgcgtggcgctc

SEQ ID NO: 4026 - DNA, 20 bp, Artificial
  20-mer unique DNA sequence
ggcgaggtaacgaagcggag

SEQ ID NO: 4027 - DNA, 20 bp, Artificial
  20-mer unique DNA sequence
aggaagtgcgggtggaacgc

SEQ ID NO: 4028 - DNA, 20 bp, Artificial
  20-mer unique DNA sequence
tagcccgcctgaacatccgt

SEQ ID NO: 4029 - DNA, 20 bp, Artificial
  20-mer unique DNA sequence
ggctgcaacaacgcggtaag

SEQ ID NO: 4030 - DNA, 20 bp, Artificial
  20-mer unique DNA sequence
attcgtgctggggctgcttt

SEQ ID NO: 4031 - DNA, 20 bp, Artificial
  20-mer unique DNA sequence
gcggcggtgagcattcatgt

SEQ ID NO: 4032 - DNA, 20 bp, Artificial
  20-mer unique DNA sequence
ctctcgctgcccgtcccttc

SEQ ID NO: 4033 - DNA, 20 bp, Artificial
  20-mer unique DNA sequence
tagcccgacaccgcgaacat

SEQ ID NO: 4034 - DNA, 20 bp, Artificial
  20-mer unique DNA sequence
ctgtcgtcgtccgggttggt

SEQ ID NO: 4035 - DNA, 20 bp, Artificial
  20-mer unique DNA sequence
cgcgccgtaggagaaagcat

SEQ ID NO: 4036 - DNA, 20 bp, Artificial
  20-mer unique DNA sequence
cagagcgaagctaggcggga

SEQ ID NO: 4037 - DNA, 20 bp, Artificial
  20-mer unique DNA sequence
ctgggatgaaggggcgcaac

SEQ ID NO: 4038 - DNA, 20 bp, Artificial
  20-mer unique DNA sequence
ggggcgggcggtagtgttct

SEQ ID NO: 4039 - DNA, 20 bp, Artificial
  20-mer unique DNA sequence
gccctgtttttgctgacgat

SEQ ID NO: 4040 - DNA, 20 bp, Artificial
  20-mer unique DNA sequence
gaaggcaggcaggggcgttt

SEQ ID NO: 4041 - DNA, 20 bp, Artificial
  20-mer unique DNA sequence
gggcaagtggagcaggcaag

SEQ ID NO: 4042 - DNA, 20 bp, Artificial
  20-mer unique DNA sequence
acatcccccgctagcccaaa

SEQ ID NO: 4043 - DNA, 20 bp, Artificial
  20-mer unique DNA sequence
acgcgccgaatcaatccatc

SEQ ID NO: 4044 - DNA, 20 bp, Artificial
  20-mer unique DNA sequence
ttacacgttccacccccgcg

SEQ ID NO: 4045 - DNA, 20 bp, Artificial
  20-mer unique DNA sequence
cagctcccccgaacgatcct

SEQ ID NO: 4046 - DNA, 20 bp, Artificial
  20-mer unique DNA sequence
accgccccacccaacttaca

SEQ ID NO: 4047 - DNA, 20 bp, Artificial
  20-mer unique DNA sequence
atcaaagggggggaaggggt

SEQ ID NO: 4048 - DNA, 20 bp, Artificial
  20-mer unique DNA sequence
gcgcctatcacccagaccga

SEQ ID NO: 4049 - DNA, 20 bp, Artificial
  20-mer unique DNA sequence
cacacttcgcgcctcacgtc

SEQ ID NO: 4050 - DNA, 20 bp, Artificial
  20-mer unique DNA sequence
cccgatacccccgaaccagg

SEQ ID NO: 4051 - DNA, 20 bp, Artificial
  20-mer unique DNA sequence
ggtgggcgggggtagagttt

SEQ ID NO: 4052 - DNA, 20 bp, Artificial
  20-mer unique DNA sequence
ctaaccgggggacgcaacga

SEQ ID NO: 4053 - DNA, 20 bp, Artificial
  20-mer unique DNA sequence
caccgtccatgccacctcct

SEQ ID NO: 4054 - DNA, 20 bp, Artificial
  20-mer unique DNA sequence
ccaaagacacgaggggggag

SEQ ID NO: 4055 - DNA, 20 bp, Artificial
  20-mer unique DNA sequence
attagggatgcgggcggagc

SEQ ID NO: 4056 - DNA, 20 bp, Artificial
  20-mer unique DNA sequence
ccatcctccgcgcgttatct

SEQ ID NO: 4057 - DNA, 20 bp, Artificial
  20-mer unique DNA sequence
ggaaaataaggagcccgccg

SEQ ID NO: 4058 - DNA, 20 bp, Artificial
  20-mer unique DNA sequence
ttgaaaaccagtccgcgcac

SEQ ID NO: 4059 - DNA, 20 bp, Artificial
  20-mer unique DNA sequence
tacaaggctggcggaacacg

SEQ ID NO: 4060 - DNA, 20 bp, Artificial
  20-mer unique DNA sequence
ttgctacccggatccaccca

SEQ ID NO: 4061 - DNA, 20 bp, Artificial
  20-mer unique DNA sequence
ttgtcttcgccccgcttgat

SEQ ID NO: 4062 - DNA, 20 bp, Artificial
  20-mer unique DNA sequence
cacatgccaccccggaacaa

SEQ ID NO: 4063 - DNA, 20 bp, Artificial
  20-mer unique DNA sequence
tccagccatacgaaacgggg

SEQ ID NO: 4064 - DNA, 20 bp, Artificial
  20-mer unique DNA sequence
agaattgaggcggcgggaca

SEQ ID NO: 4065 - DNA, 20 bp, Artificial
  20-mer unique DNA sequence
cggtgcctctcccctcccta

SEQ ID NO: 4066 - DNA, 20 bp, Artificial
  20-mer unique DNA sequence
tgcctgtgcgttgggactgt

SEQ ID NO: 4067 - DNA, 20 bp, Artificial
  20-mer unique DNA sequence
cctccgcaatcagccatcct

SEQ ID NO: 4068 - DNA, 20 bp, Artificial
  20-mer unique DNA sequence
acaccaggccgaggaggtca

SEQ ID NO: 4069 - DNA, 20 bp, Artificial
  20-mer unique DNA sequence
tccaacgcgacccctcctag

SEQ ID NO: 4070 - DNA, 20 bp, Artificial
  20-mer unique DNA sequence
tttccgcccttctcaaccga

SEQ ID NO: 4071 - DNA, 20 bp, Artificial
  20-mer unique DNA sequence
gcacggggtggtggcatagt

SEQ ID NO: 4072 - DNA, 20 bp, Artificial
  20-mer unique DNA sequence
agcgttcttggtcggtggca

SEQ ID NO: 4073 - DNA, 20 bp, Artificial
  20-mer unique DNA sequence
gtcccgccccaaatgtcctc

SEQ ID NO: 4074 - DNA, 20 bp, Artificial
  20-mer unique DNA sequence
gacggtgggagaatggcgat

SEQ ID NO: 4075 - DNA, 20 bp, Artificial
  20-mer unique DNA sequence
ccggggctgtcctgtctctg

SEQ ID NO: 4076 - DNA, 20 bp, Artificial
  20-mer unique DNA sequence
gcgttgttcccctgctgtgc

SEQ ID NO: 4077 - DNA, 20 bp, Artificial
  20-mer unique DNA sequence
ggcccaaccaccccaagctc

SEQ ID NO: 4078 - DNA, 20 bp, Artificial
  20-mer unique DNA sequence
caccctcccccaccttacga

SEQ ID NO: 4079 - DNA, 20 bp, Artificial
  20-mer unique DNA sequence
tggggtccgctattgtcccg

SEQ ID NO: 4080 - DNA, 20 bp, Artificial
  20-mer unique DNA sequence
cacctcagaattcgcgtccg

SEQ ID NO: 4081 - DNA, 20 bp, Artificial
  20-mer unique DNA sequence
tgcctctaatcgcgccgtca

SEQ ID NO: 4082 - DNA, 20 bp, Artificial
  20-mer unique DNA sequence
cgagtgcgttgtgggatggg

SEQ ID NO: 4083 - DNA, 20 bp, Artificial
  20-mer unique DNA sequence
tcggtgtgccctctatgcgc

SEQ ID NO: 4084 - DNA, 20 bp, Artificial
  20-mer unique DNA sequence
ccgtggggtgagatggcaaa

SEQ ID NO: 4085 - DNA, 20 bp, Artificial
  20-mer unique DNA sequence
ggatcggtgaggacgggtgg

SEQ ID NO: 4086 - DNA, 20 bp, Artificial
  20-mer unique DNA sequence
atgggagcaggggcaacagg

SEQ ID NO: 4087 - DNA, 20 bp, Artificial
  20-mer unique DNA sequence
gcggcggctgagtcgatctt

SEQ ID NO: 4088 - DNA, 20 bp, Artificial
  20-mer unique DNA sequence
cggctcgggtatttgttggc

SEQ ID NO: 4089 - DNA, 20 bp, Artificial
  20-mer unique DNA sequence
aatcccttgcggctcgtgct

SEQ ID NO: 4090 - DNA, 20 bp, Artificial
  20-mer unique DNA sequence
caccgcaagcagcccgagag

SEQ ID NO: 4091 - DNA, 20 bp, Artificial
  20-mer unique DNA sequence
caagattcacaccgcgtccg

SEQ ID NO: 4092 - DNA, 20 bp, Artificial
  20-mer unique DNA sequence
gatgtatgctcgaggccgcg

SEQ ID NO: 4093 - DNA, 20 bp, Artificial
  20-mer unique DNA sequence
tcttcgcttcctccatggct

SEQ ID NO: 4094 - DNA, 20 bp, Artificial
  20-mer unique DNA sequence
ggatagtgttggcgaggcgc

SEQ ID NO: 4095 - DNA, 20 bp, Artificial
  20-mer unique DNA sequence
aggcgtggaggtattgggaa

SEQ ID NO: 4096 - DNA, 20 bp, Artificial
  20-mer unique DNA sequence
gggactgatagcgtgaggcg

SEQ ID NO: 4097 - DNA, 20 bp, Artificial
  20-mer unique DNA sequence
gggagggcggaggtggctat

SEQ ID NO: 4098 - DNA, 20 bp, Artificial
  20-mer unique DNA sequence
tcggtgcgtcggggactatt

SEQ ID NO: 4099 - DNA, 20 bp, Artificial
  20-mer unique DNA sequence
ggaggttggggaagggcacg

SEQ ID NO: 4100 - DNA, 20 bp, Artificial
  20-mer unique DNA sequence
gatccaaccccaacccgcat

SEQ ID NO: 4101 - DNA, 20 bp, Artificial
  20-mer unique DNA sequence
gtccccatctcccgtgcctc

SEQ ID NO: 4102 - DNA, 20 bp, Artificial
  20-mer unique DNA sequence
cccgccgccatcatagaaac

SEQ ID NO: 4103 - DNA, 20 bp, Artificial
  20-mer unique DNA sequence
tgcgggggaggcttttctgt

SEQ ID NO: 4104 - DNA, 20 bp, Artificial
  20-mer unique DNA sequence
ttcttgcttgtgccctgccg

SEQ ID NO: 4105 - DNA, 20 bp, Artificial
  20-mer unique DNA sequence
agcggaggaactttgagcgg

SEQ ID NO: 4106 - DNA, 20 bp, Artificial
  20-mer unique DNA sequence
agcatcagtggttcgggggt

SEQ ID NO: 4107 - DNA, 20 bp, Artificial
  20-mer unique DNA sequence
atctcggaccctcgccccct

SEQ ID NO: 4108 - DNA, 20 bp, Artificial
  20-mer unique DNA sequence
actggggcgggcataaaaga

SEQ ID NO: 4109 - DNA, 20 bp, Artificial
  20-mer unique DNA sequence
tgttctctccaccctcgccg

SEQ ID NO: 4110 - DNA, 20 bp, Artificial
  20-mer unique DNA sequence
tgcctcgcttgctcctcttg

SEQ ID NO: 4111 - DNA, 20 bp, Artificial
  20-mer unique DNA sequence
atcctccatcacttcgcccg

SEQ ID NO: 4112 - DNA, 20 bp, Artificial
  20-mer unique DNA sequence
gtttcagggcatcggagagg

SEQ ID NO: 4113 - DNA, 20 bp, Artificial
  20-mer unique DNA sequence
cgcttgctttgcttgcccga

SEQ ID NO: 4114 - DNA, 20 bp, Artificial
  20-mer unique DNA sequence
gagtttcgttccggttgccc

SEQ ID NO: 4115 - DNA, 20 bp, Artificial
  20-mer unique DNA sequence
tcggtgagtggcgcaaagca

SEQ ID NO: 4116 - DNA, 20 bp, Artificial
  20-mer unique DNA sequence
ctgcggtgatggttgtgcgt

SEQ ID NO: 4117 - DNA, 20 bp, Artificial
  20-mer unique DNA sequence
agcagggggcgcaaaggtag

SEQ ID NO: 4118 - DNA, 20 bp, Artificial
  20-mer unique DNA sequence
ccatctgcagcccatccgtt

SEQ ID NO: 4119 - DNA, 20 bp, Artificial
  20-mer unique DNA sequence
gagctcccgcatttgaaccc

SEQ ID NO: 4120 - DNA, 20 bp, Artificial
  20-mer unique DNA sequence
tgatgggggcaagtgggtcg

SEQ ID NO: 4121 - DNA, 20 bp, Artificial
  20-mer unique DNA sequence
cgccaagcacaccgcacaga

SEQ ID NO: 4122 - DNA, 20 bp, Artificial
  20-mer unique DNA sequence
gcgctgggccttcggtacaa

SEQ ID NO: 4123 - DNA, 20 bp, Artificial
  20-mer unique DNA sequence
aacccccccctgcttgacgt

SEQ ID NO: 4124 - DNA, 20 bp, Artificial
  20-mer unique DNA sequence
acagtcgtccaacggggcgg

SEQ ID NO: 4125 - DNA, 20 bp, Artificial
  20-mer unique DNA sequence
ccaggcccagacccgaggaa

SEQ ID NO: 4126 - DNA, 20 bp, Artificial
  20-mer unique DNA sequence
actcgcactagcgaacgaca

SEQ ID NO: 4127 - DNA, 20 bp, Artificial
  20-mer unique DNA sequence
gcggacagggacacacacgg

SEQ ID NO: 4128 - DNA, 20 bp, Artificial
  20-mer unique DNA sequence
gatcccccgctgcaactccg

SEQ ID NO: 4129 - DNA, 20 bp, Artificial
  20-mer unique DNA sequence
tcgggaatacgcgggtgtgg

SEQ ID NO: 4130 - DNA, 20 bp, Artificial
  20-mer unique DNA sequence
ccagacccacagccacccag

SEQ ID NO: 4131 - DNA, 20 bp, Artificial
  20-mer unique DNA sequence
cgacccgcaacgaacaaggt

SEQ ID NO: 4132 - DNA, 20 bp, Artificial
  20-mer unique DNA sequence
cgcaccaagacggccaggat

SEQ ID NO: 4133 - DNA, 20 bp, Artificial
  20-mer unique DNA sequence
ggtgatgttggggcgaggct

SEQ ID NO: 4134 - DNA, 20 bp, Artificial
  20-mer unique DNA sequence
cactcgcacaccgccaactt

SEQ ID NO: 4135 - DNA, 20 bp, Artificial
  20-mer unique DNA sequence
gctgggtgtgcgtcttcctg

SEQ ID NO: 4136 - DNA, 20 bp, Artificial
  20-mer unique DNA sequence
ctacgggggaaatggggggc

SEQ ID NO: 4137 - DNA, 20 bp, Artificial
  20-mer unique DNA sequence
acagccacccaaccccgatc

SEQ ID NO: 4138 - DNA, 20 bp, Artificial
  20-mer unique DNA sequence
cgcaccacgatacaccccag

SEQ ID NO: 4139 - DNA, 20 bp, Artificial
  20-mer unique DNA sequence
cctattcacccccgctttcg

SEQ ID NO: 4140 - DNA, 20 bp, Artificial
  20-mer unique DNA sequence
acccaaagaccacgcggcaa

SEQ ID NO: 4141 - DNA, 20 bp, Artificial
  20-mer unique DNA sequence
agatccgcaggccaacgcac

SEQ ID NO: 4142 - DNA, 20 bp, Artificial
  20-mer unique DNA sequence
agctttctcccaatcgcccg

SEQ ID NO: 4143 - DNA, 20 bp, Artificial
  20-mer unique DNA sequence
ggctggccgaatgcttgatg

SEQ ID NO: 4144 - DNA, 20 bp, Artificial
  20-mer unique DNA sequence
ttcgtcatgctgggcggacg

SEQ ID NO: 4145 - DNA, 20 bp, Artificial
  20-mer unique DNA sequence
ccttgcaaagtacgcccggc

SEQ ID NO: 4146 - DNA, 20 bp, Artificial
  20-mer unique DNA sequence
ttaaggacgcaaaagccccg

SEQ ID NO: 4147 - DNA, 20 bp, Artificial
  20-mer unique DNA sequence
gcggaaacgactgctgaccc

SEQ ID NO: 4148 - DNA, 20 bp, Artificial
  20-mer unique DNA sequence
gggaggctgattggcggatg

SEQ ID NO: 4149 - DNA, 20 bp, Artificial
  20-mer unique DNA sequence
gtccaggggtgccagaaacg

SEQ ID NO: 4150 - DNA, 20 bp, Artificial
  20-mer unique DNA sequence
ggggtggcatgtcttgggat

SEQ ID NO: 4151 - DNA, 20 bp, Artificial
  20-mer unique DNA sequence
cgggagctgggctgtcatca

SEQ ID NO: 4152 - DNA, 20 bp, Artificial
  20-mer unique DNA sequence
tcctaagcaaggcgccccgt

SEQ ID NO: 4153 - DNA, 20 bp, Artificial
  20-mer unique DNA sequence
gacacgtcaggcgcacaccc

SEQ ID NO: 4154 - DNA, 20 bp, Artificial
  20-mer unique DNA sequence
cgagcgggcaatgggtaacg

SEQ ID NO: 4155 - DNA, 20 bp, Artificial
  20-mer unique DNA sequence
cccgaagcagcaccggatca

SEQ ID NO: 4156 - DNA, 20 bp, Artificial
  20-mer unique DNA sequence
tcgcgcatcggagtgttagg

SEQ ID NO: 4157 - DNA, 20 bp, Artificial
  20-mer unique DNA sequence
ccccctcggcagttgtttca

SEQ ID NO: 4158 - DNA, 20 bp, Artificial
  20-mer unique DNA sequence
tcctgacatgctggccctcg

SEQ ID NO: 4159 - DNA, 20 bp, Artificial
  20-mer unique DNA sequence
cgccggacgttgagggtatg

SEQ ID NO: 4160 - DNA, 20 bp, Artificial
  20-mer unique DNA sequence
aatctcaacccccaccagcg

SEQ ID NO: 4161 - DNA, 20 bp, Artificial
  20-mer unique DNA sequence
gatgttttcagcggcctccc

SEQ ID NO: 4162 - DNA, 20 bp, Artificial
  20-mer unique DNA sequence
atcgcgcgtctgagttgcag

SEQ ID NO: 4163 - DNA, 20 bp, Artificial
  20-mer unique DNA sequence
tgctctgagcgtcggctgaa

SEQ ID NO: 4164 - DNA, 20 bp, Artificial
  20-mer unique DNA sequence
gcctgcttcgtccccgtatg

SEQ ID NO: 4165 - DNA, 20 bp, Artificial
  20-mer unique DNA sequence
gaggtgggcaaggatggacg

SEQ ID NO: 4166 - DNA, 20 bp, Artificial
  20-mer unique DNA sequence
gtggcttggatggcgtggtt

SEQ ID NO: 4167 - DNA, 20 bp, Artificial
  20-mer unique DNA sequence
tggcgttttcggttcggtct

SEQ ID NO: 4168 - DNA, 20 bp, Artificial
  20-mer unique DNA sequence
ttctcatgtaaggcgccgcg

SEQ ID NO: 4169 - DNA, 20 bp, Artificial
  20-mer unique DNA sequence
aacatcggcccacccgctaa

SEQ ID NO: 4170 - DNA, 20 bp, Artificial
  20-mer unique DNA sequence
gatggcttaaggtggggctc

SEQ ID NO: 4171 - DNA, 20 bp, Artificial
  20-mer unique DNA sequence
tgtttcccccgcctcccaat

SEQ ID NO: 4172 - DNA, 20 bp, Artificial
  20-mer unique DNA sequence
gacgtacccgacccagccac

SEQ ID NO: 4173 - DNA, 20 bp, Artificial
  20-mer unique DNA sequence
tgagtgcttgtgcggtcgga

SEQ ID NO: 4174 - DNA, 20 bp, Artificial
  20-mer unique DNA sequence
aggaacggacgggggaagac

SEQ ID NO: 4175 - DNA, 20 bp, Artificial
  20-mer unique DNA sequence
gcgggaaagtgggacaggtg

SEQ ID NO: 4176 - DNA, 20 bp, Artificial
  20-mer unique DNA sequence
ggttcccctctcccaccctg

SEQ ID NO: 4177 - DNA, 20 bp, Artificial
  20-mer unique DNA sequence
cttcctgccccaagtcgcgt

SEQ ID NO: 4178 - DNA, 20 bp, Artificial
  20-mer unique DNA sequence
aacatatcccccccgccaac

SEQ ID NO: 4179 - DNA, 20 bp, Artificial
  20-mer unique DNA sequence
gccaaaccgctgcacccatt

SEQ ID NO: 4180 - DNA, 20 bp, Artificial
  20-mer unique DNA sequence
ttgcattcccgatgggccta

SEQ ID NO: 4181 - DNA, 20 bp, Artificial
  20-mer unique DNA sequence
cggcggccataagacagacc

SEQ ID NO: 4182 - DNA, 20 bp, Artificial
  20-mer unique DNA sequence
aacggctatcgagagggggc

SEQ ID NO: 4183 - DNA, 20 bp, Artificial
  20-mer unique DNA sequence
ccgccagtggaagatcgcca

SEQ ID NO: 4184 - DNA, 20 bp, Artificial
  20-mer unique DNA sequence
tgattgccgccctgtgtcct

SEQ ID NO: 4185 - DNA, 20 bp, Artificial
  20-mer unique DNA sequence
ccgccgtcctcgcccttcta

SEQ ID NO: 4186 - DNA, 20 bp, Artificial
  20-mer unique DNA sequence
tgctcgcctcaccctgtcaa

SEQ ID NO: 4187 - DNA, 20 bp, Artificial
  20-mer unique DNA sequence
ttcgataccccgctcacccg

SEQ ID NO: 4188 - DNA, 20 bp, Artificial
  20-mer unique DNA sequence
tggggcgtgaggcttgtggt

SEQ ID NO: 4189 - DNA, 20 bp, Artificial
  20-mer unique DNA sequence
gtgggcaggtttgcgatggg

SEQ ID NO: 4190 - DNA, 20 bp, Artificial
  20-mer unique DNA sequence
tggccaccgattcaccgctt

SEQ ID NO: 4191 - DNA, 20 bp, Artificial
  20-mer unique DNA sequence
tgaaaccaacctcgcgcgtc

SEQ ID NO: 4192 - DNA, 20 bp, Artificial
  20-mer unique DNA sequence
acccccacagctgcctacca

SEQ ID NO: 4193 - DNA, 20 bp, Artificial
  20-mer unique DNA sequence
ccccgggtcacacaaatgcg

SEQ ID NO: 4194 - DNA, 20 bp, Artificial
  20-mer unique DNA sequence
tgctaccgaatactgcgcgc

SEQ ID NO: 4195 - DNA, 20 bp, Artificial
  20-mer unique DNA sequence
acggttggctccctcccagg

SEQ ID NO: 4196 - DNA, 20 bp, Artificial
  20-mer unique DNA sequence
cctacccccggcgtttacaa

SEQ ID NO: 4197 - DNA, 20 bp, Artificial
  20-mer unique DNA sequence
cgattacgtagctgcgcccc

SEQ ID NO: 4198 - DNA, 20 bp, Artificial
  20-mer unique DNA sequence
aaaaccttcctccgcacccc

SEQ ID NO: 4199 - DNA, 20 bp, Artificial
  20-mer unique DNA sequence
cgcccacgcccatcatccac

SEQ ID NO: 4200 - DNA, 20 bp, Artificial
  20-mer unique DNA sequence
gtggtgaatggtgtggcgct

SEQ ID NO: 4201 - DNA, 20 bp, Artificial
  20-mer unique DNA sequence
gacagcggggcgaagaacaa

SEQ ID NO: 4202 - DNA, 20 bp, Artificial
  20-mer unique DNA sequence
aagaacgtggaacggccgga

SEQ ID NO: 4203 - DNA, 20 bp, Artificial
  20-mer unique DNA sequence
gggagggggtggagaagcaa

SEQ ID NO: 4204 - DNA, 20 bp, Artificial
  20-mer unique DNA sequence
ccaagacccacatcgccacg

SEQ ID NO: 4205 - DNA, 20 bp, Artificial
  20-mer unique DNA sequence
cgcgcggtctccttcctact

SEQ ID NO: 4206 - DNA, 20 bp, Artificial
  20-mer unique DNA sequence
ttcgggagtgcatcttgggg

SEQ ID NO: 4207 - DNA, 20 bp, Artificial
  20-mer unique DNA sequence
gagcccactgtccatcccga

SEQ ID NO: 4208 - DNA, 20 bp, Artificial
  20-mer unique DNA sequence
atcgcccacttcccgcatct

SEQ ID NO: 4209 - DNA, 20 bp, Artificial
  20-mer unique DNA sequence
tgtccctcccgccactgatt

SEQ ID NO: 4210 - DNA, 20 bp, Artificial
  20-mer unique DNA sequence
ggcgggcgacgataaacttg

SEQ ID NO: 4211 - DNA, 20 bp, Artificial
  20-mer unique DNA sequence
ctctgttaccccccgcccga

SEQ ID NO: 4212 - DNA, 20 bp, Artificial
  20-mer unique DNA sequence
aaccacccaccccgtcttga

SEQ ID NO: 4213 - DNA, 20 bp, Artificial
  20-mer unique DNA sequence
gcgttgctgctggcttttga

SEQ ID NO: 4214 - DNA, 20 bp, Artificial
  20-mer unique DNA sequence
gcgcctgccatccgtttcct

SEQ ID NO: 4215 - DNA, 20 bp, Artificial
  20-mer unique DNA sequence
gccattccccccatcgacct

SEQ ID NO: 4216 - DNA, 20 bp, Artificial
  20-mer unique DNA sequence
gcgactgggttgagcgattg

SEQ ID NO: 4217 - DNA, 20 bp, Artificial
  20-mer unique DNA sequence
ggagccgagggtgaaaaggc

SEQ ID NO: 4218 - DNA, 20 bp, Artificial
  20-mer unique DNA sequence
cctcgcaagggcggtcttaa

SEQ ID NO: 4219 - DNA, 20 bp, Artificial
  20-mer unique DNA sequence
tgctcaattacccatgggcg

SEQ ID NO: 4220 - DNA, 20 bp, Artificial
  20-mer unique DNA sequence
cgtgaatagtacgcgggcgc

SEQ ID NO: 4221 - DNA, 20 bp, Artificial
  20-mer unique DNA sequence
gattggggcgtgtcgtctaa

SEQ ID NO: 4222 - DNA, 20 bp, Artificial
  20-mer unique DNA sequence
cacatgagcctagaccggca

SEQ ID NO: 4223 - DNA, 20 bp, Artificial
  20-mer unique DNA sequence
ctcgaccccacgccttccgt

SEQ ID NO: 4224 - DNA, 20 bp, Artificial
  20-mer unique DNA sequence
cgtttatgcccgcgtgttcg

SEQ ID NO: 4225 - DNA, 20 bp, Artificial
  20-mer unique DNA sequence
cgtaagtcgcccaggtcccg

SEQ ID NO: 4226 - DNA, 20 bp, Artificial
  20-mer unique DNA sequence
cggtcttcttgcccgtctcc

SEQ ID NO: 4227 - DNA, 20 bp, Artificial
  20-mer unique DNA sequence
gcagcaaggaggcgagggtc

SEQ ID NO: 4228 - DNA, 20 bp, Artificial
  20-mer unique DNA sequence
caggcggagggatagaggcg

SEQ ID NO: 4229 - DNA, 20 bp, Artificial
  20-mer unique DNA sequence
gacacacagcatcacgcgca

SEQ ID NO: 4230 - DNA, 20 bp, Artificial
  20-mer unique DNA sequence
tatgaaagccacgcccggaa

SEQ ID NO: 4231 - DNA, 20 bp, Artificial
  20-mer unique DNA sequence
cccaatcttcgcacccgttc

SEQ ID NO: 4232 - DNA, 20 bp, Artificial
  20-mer unique DNA sequence
aaccccgctctttcgctcaa

SEQ ID NO: 4233 - DNA, 20 bp, Artificial
  20-mer unique DNA sequence
tttccctccggcttctgata

SEQ ID NO: 4234 - DNA, 20 bp, Artificial
  20-mer unique DNA sequence
tagcagcgcttccgtcggtt

SEQ ID NO: 4235 - DNA, 20 bp, Artificial
  20-mer unique DNA sequence
aaaataaacctcgccggcca

SEQ ID NO: 4236 - DNA, 20 bp, Artificial
  20-mer unique DNA sequence
cgcaaccgagcagcaaaatg

SEQ ID NO: 4237 - DNA, 20 bp, Artificial
  20-mer unique DNA sequence
tgaggggaatgccaagggag

SEQ ID NO: 4238 - DNA, 20 bp, Artificial
  20-mer unique DNA sequence
cccctacgtgtgatcccggt

SEQ ID NO: 4239 - DNA, 20 bp, Artificial
  20-mer unique DNA sequence
gatagagagcgcgcgttgcg

SEQ ID NO: 4240 - DNA, 20 bp, Artificial
  20-mer unique DNA sequence
atgggggagacatgtttgcg

SEQ ID NO: 4241 - DNA, 20 bp, Artificial
  20-mer unique DNA sequence
aatatcctgcggcccatcca

SEQ ID NO: 4242 - DNA, 20 bp, Artificial
  20-mer unique DNA sequence
ccacggcggccctaaactga

SEQ ID NO: 4243 - DNA, 20 bp, Artificial
  20-mer unique DNA sequence
ttttcgcgccctgatgtgga

SEQ ID NO: 4244 - DNA, 20 bp, Artificial
  20-mer unique DNA sequence
gcggcaaggcgaggtagtga

SEQ ID NO: 4245 - DNA, 20 bp, Artificial
  20-mer unique DNA sequence
gaaagggccggacgatggat

SEQ ID NO: 4246 - DNA, 20 bp, Artificial
  20-mer unique DNA sequence
gtaaatttcggcggggagcg

SEQ ID NO: 4247 - DNA, 20 bp, Artificial
  20-mer unique DNA sequence
ttgggtcgttgggagggtga

SEQ ID NO: 4248 - DNA, 20 bp, Artificial
  20-mer unique DNA sequence
gtgcgtgattcagtcgcggt

SEQ ID NO: 4249 - DNA, 20 bp, Artificial
  20-mer unique DNA sequence
gctgtcgacgaacgtcactg

SEQ ID NO: 4250 - DNA, 20 bp, Artificial
  20-mer unique DNA sequence
gtttgcattttggcgcgcgt

SEQ ID NO: 4251 - DNA, 20 bp, Artificial
  20-mer unique DNA sequence
agaagggcagggatgcgagg

SEQ ID NO: 4252 - DNA, 20 bp, Artificial
  20-mer unique DNA sequence
gcggcagccatgttcgtaga

SEQ ID NO: 4253 - DNA, 20 bp, Artificial
  20-mer unique DNA sequence
caatagtgaacgcccgccaa

SEQ ID NO: 4254 - DNA, 20 bp, Artificial
  20-mer unique DNA sequence
tttccgacacagcagccagg

SEQ ID NO: 4255 - DNA, 20 bp, Artificial
  20-mer unique DNA sequence
gcacgacccccgtatggaga

SEQ ID NO: 4256 - DNA, 20 bp, Artificial
  20-mer unique DNA sequence
ccttcttgccgccccgtttt

SEQ ID NO: 4257 - DNA, 20 bp, Artificial
  20-mer unique DNA sequence
atcgaagccactccccgcag

SEQ ID NO: 4258 - DNA, 20 bp, Artificial
  20-mer unique DNA sequence
gactggacgcaaacgacgga

SEQ ID NO: 4259 - DNA, 20 bp, Artificial
  20-mer unique DNA sequence
ggagataggccggatgagcg

SEQ ID NO: 4260 - DNA, 20 bp, Artificial
  20-mer unique DNA sequence
tccatacccgtcccccgctt

SEQ ID NO: 4261 - DNA, 20 bp, Artificial
  20-mer unique DNA sequence
ggctgtatggagggcgtgga

SEQ ID NO: 4262 - DNA, 20 bp, Artificial
  20-mer unique DNA sequence
agtcccgcgtcccttaagca

SEQ ID NO: 4263 - DNA, 20 bp, Artificial
  20-mer unique DNA sequence
gcggaggggggggaagttag

SEQ ID NO: 4264 - DNA, 20 bp, Artificial
  20-mer unique DNA sequence
gggcgagcgttacacgggta

SEQ ID NO: 4265 - DNA, 20 bp, Artificial
  20-mer unique DNA sequence
tgaaccccgtccgaccgata

SEQ ID NO: 4266 - DNA, 20 bp, Artificial
  20-mer unique DNA sequence
gcagggaatcgggaacgcca

SEQ ID NO: 4267 - DNA, 20 bp, Artificial
  20-mer unique DNA sequence
tttgttgcggctttgcgatt

SEQ ID NO: 4268 - DNA, 20 bp, Artificial
  20-mer unique DNA sequence
cattagttggcgcaggggct

SEQ ID NO: 4269 - DNA, 20 bp, Artificial
  20-mer unique DNA sequence
cgtgttggaggggctaggag

SEQ ID NO: 4270 - DNA, 20 bp, Artificial
  20-mer unique DNA sequence
gctacgggcgggataaccca

SEQ ID NO: 4271 - DNA, 20 bp, Artificial
  20-mer unique DNA sequence
tgcgtgtgtcccgatgtggt

SEQ ID NO: 4272 - DNA, 20 bp, Artificial
  20-mer unique DNA sequence
gcgggtgggacggactttta

SEQ ID NO: 4273 - DNA, 20 bp, Artificial
  20-mer unique DNA sequence
atgtctcccagcgtccccac

SEQ ID NO: 4274 - DNA, 20 bp, Artificial
  20-mer unique DNA sequence
agcgccggtggtaaaggaca

SEQ ID NO: 4275 - DNA, 20 bp, Artificial
  20-mer unique DNA sequence
cccaaccgcatcctttacgc

SEQ ID NO: 4276 - DNA, 20 bp, Artificial
  20-mer unique DNA sequence
acgctcccgccgacaaaatg

SEQ ID NO: 4277 - DNA, 20 bp, Artificial
  20-mer unique DNA sequence
ccaggtgcgtaacaccctgt

SEQ ID NO: 4278 - DNA, 20 bp, Artificial
  20-mer unique DNA sequence
gaggatgggggggagcgagt

SEQ ID NO: 4279 - DNA, 20 bp, Artificial
  20-mer unique DNA sequence
ggagcaggagaacgggggtc

SEQ ID NO: 4280 - DNA, 20 bp, Artificial
  20-mer unique DNA sequence
aatcaagcagaagcgggcgt

SEQ ID NO: 4281 - DNA, 20 bp, Artificial
  20-mer unique DNA sequence
cgtggttgtttcccgccgat

SEQ ID NO: 4282 - DNA, 20 bp, Artificial
  20-mer unique DNA sequence
gtgccgccctcctacgattc

SEQ ID NO: 4283 - DNA, 20 bp, Artificial
  20-mer unique DNA sequence
cggaaggggaaagagcaggc

SEQ ID NO: 4284 - DNA, 20 bp, Artificial
  20-mer unique DNA sequence
actcgccacaccgcctaacg

SEQ ID NO: 4285 - DNA, 20 bp, Artificial
  20-mer unique DNA sequence
tccccagattaccgcacgcc

SEQ ID NO: 4286 - DNA, 20 bp, Artificial
  20-mer unique DNA sequence
cagcacaccactgcccctga

SEQ ID NO: 4287 - DNA, 20 bp, Artificial
  20-mer unique DNA sequence
gaggaaccgaagaggcgggt

SEQ ID NO: 4288 - DNA, 20 bp, Artificial
  20-mer unique DNA sequence
tcttggacggcggaactgtg

SEQ ID NO: 4289 - DNA, 20 bp, Artificial
  20-mer unique DNA sequence
accgtttctgagggcccgac

SEQ ID NO: 4290 - DNA, 20 bp, Artificial
  20-mer unique DNA sequence
aggcaaccgcaggcataacc

SEQ ID NO: 4291 - DNA, 20 bp, Artificial
  20-mer unique DNA sequence
tttctgatccaaccacgcgg

SEQ ID NO: 4292 - DNA, 20 bp, Artificial
  20-mer unique DNA sequence
ccgcctcgtagacgccaaga

SEQ ID NO: 4293 - DNA, 20 bp, Artificial
  20-mer unique DNA sequence
cggcactcggaaacggctaa

SEQ ID NO: 4294 - DNA, 20 bp, Artificial
  20-mer unique DNA sequence
attgacggctggttcccccc

SEQ ID NO: 4295 - DNA, 20 bp, Artificial
  20-mer unique DNA sequence
ctgcactagtccccgcgtgg

SEQ ID NO: 4296 - DNA, 20 bp, Artificial
  20-mer unique DNA sequence
tttttgcgcacgggattggg

SEQ ID NO: 4297 - DNA, 20 bp, Artificial
  20-mer unique DNA sequence
gtcctgaaagcccgtgccgt

SEQ ID NO: 4298 - DNA, 20 bp, Artificial
  20-mer unique DNA sequence
cccctggataaccccttgcg

SEQ ID NO: 4299 - DNA, 20 bp, Artificial
  20-mer unique DNA sequence
cgcctgccgttgggaatatt

SEQ ID NO: 4300 - DNA, 20 bp, Artificial
  20-mer unique DNA sequence
tcgcgtgagtggtttgcgtg

SEQ ID NO: 4301 - DNA, 20 bp, Artificial
  20-mer unique DNA sequence
caaccgccccgacaaggata

SEQ ID NO: 4302 - DNA, 20 bp, Artificial
  20-mer unique DNA sequence
gagaacggggcactggctga

SEQ ID NO: 4303 - DNA, 20 bp, Artificial
  20-mer unique DNA sequence
tgctgcccacgttgttttgc

SEQ ID NO: 4304 - DNA, 20 bp, Artificial
  20-mer unique DNA sequence
tctgctagcgcgcgaagctt

SEQ ID NO: 4305 - DNA, 20 bp, Artificial
  20-mer unique DNA sequence
acgttgctggaccccttccg

SEQ ID NO: 4306 - DNA, 20 bp, Artificial
  20-mer unique DNA sequence
tgcgcgcccaagaagaaatg

SEQ ID NO: 4307 - DNA, 20 bp, Artificial
  20-mer unique DNA sequence
cgccgggatgggttagctct

SEQ ID NO: 4308 - DNA, 20 bp, Artificial
  20-mer unique DNA sequence
cggcgacgagattcgaagct

SEQ ID NO: 4309 - DNA, 20 bp, Artificial
  20-mer unique DNA sequence
tcccttttgagcccgacttg

SEQ ID NO: 4310 - DNA, 20 bp, Artificial
  20-mer unique DNA sequence
ttggggcggggtttggcagc

SEQ ID NO: 4311 - DNA, 20 bp, Artificial
  20-mer unique DNA sequence
gccgtgtatgctggggatgc

SEQ ID NO: 4312 - DNA, 20 bp, Artificial
  20-mer unique DNA sequence
gggaatgggacacgtgcgaa

SEQ ID NO: 4313 - DNA, 20 bp, Artificial
  20-mer unique DNA sequence
atgtctccccgtccgctgtc

SEQ ID NO: 4314 - DNA, 20 bp, Artificial
  20-mer unique DNA sequence
actcgcctcgacaaaacgcg

SEQ ID NO: 4315 - DNA, 20 bp, Artificial
  20-mer unique DNA sequence
gagctcgagcggggaagttg

SEQ ID NO: 4316 - DNA, 20 bp, Artificial
  20-mer unique DNA sequence
acgggaagcggacaaggatg

SEQ ID NO: 4317 - DNA, 20 bp, Artificial
  20-mer unique DNA sequence
tgtcctgttctcgcgtgggg

SEQ ID NO: 4318 - DNA, 20 bp, Artificial
  20-mer unique DNA sequence
ccccctccgctcgaattcat

SEQ ID NO: 4319 - DNA, 20 bp, Artificial
  20-mer unique DNA sequence
ccgtgcttgcgtccatgttt

SEQ ID NO: 4320 - DNA, 20 bp, Artificial
  20-mer unique DNA sequence
tgtcgtcaccctgtgtcccg

SEQ ID NO: 4321 - DNA, 20 bp, Artificial
  20-mer unique DNA sequence
tgcccccacaccccctctac

SEQ ID NO: 4322 - DNA, 20 bp, Artificial
  20-mer unique DNA sequence
cagcctccaaatgccccagt

SEQ ID NO: 4323 - DNA, 20 bp, Artificial
  20-mer unique DNA sequence
gggtgtgggcttgggcactg

SEQ ID NO: 4324 - DNA, 20 bp, Artificial
  20-mer unique DNA sequence
agctcattttgccgtcgcct

SEQ ID NO: 4325 - DNA, 20 bp, Artificial
  20-mer unique DNA sequence
gacaagcatggggggacgat

SEQ ID NO: 4326 - DNA, 20 bp, Artificial
  20-mer unique DNA sequence
ctctggcccccatgcttcgt

SEQ ID NO: 4327 - DNA, 20 bp, Artificial
  20-mer unique DNA sequence
gaagctccgacgacccccag

SEQ ID NO: 4328 - DNA, 20 bp, Artificial
  20-mer unique DNA sequence
tatctgcgcctgtccgaagc

SEQ ID NO: 4329 - DNA, 20 bp, Artificial
  20-mer unique DNA sequence
acggcgacgtccagaattga

SEQ ID NO: 4330 - DNA, 20 bp, Artificial
  20-mer unique DNA sequence
ggagccccgttgccagtttg

SEQ ID NO: 4331 - DNA, 20 bp, Artificial
  20-mer unique DNA sequence
agggcctaaagtcgcggagc

SEQ ID NO: 4332 - DNA, 20 bp, Artificial
  20-mer unique DNA sequence
gtggctcgtccgggtcttgt

SEQ ID NO: 4333 - DNA, 20 bp, Artificial
  20-mer unique DNA sequence
ggtgagagccggggtaagca

SEQ ID NO: 4334 - DNA, 20 bp, Artificial
  20-mer unique DNA sequence
atttgggccggaaggtacgc

SEQ ID NO: 4335 - DNA, 20 bp, Artificial
  20-mer unique DNA sequence
ccgttttgccggcgtttagg

SEQ ID NO: 4336 - DNA, 20 bp, Artificial
  20-mer unique DNA sequence
agcggtcgtgggtgtatgcg

SEQ ID NO: 4337 - DNA, 20 bp, Artificial
  20-mer unique DNA sequence
tgccgcctcccaactacagc

SEQ ID NO: 4338 - DNA, 20 bp, Artificial
  20-mer unique DNA sequence
gcgtggatggcggattgagg

SEQ ID NO: 4339 - DNA, 20 bp, Artificial
  20-mer unique DNA sequence
accgcccaaaaggtcccctg

SEQ ID NO: 4340 - DNA, 20 bp, Artificial
  20-mer unique DNA sequence
ccctctccgcccacctgtag

SEQ ID NO: 4341 - DNA, 20 bp, Artificial
  20-mer unique DNA sequence
gagtggaggggctggggtgt

SEQ ID NO: 4342 - DNA, 20 bp, Artificial
  20-mer unique DNA sequence
cccccttgctcggttgttgc

SEQ ID NO: 4343 - DNA, 20 bp, Artificial
  20-mer unique DNA sequence
tgtcaactcgtgggccgctg

SEQ ID NO: 4344 - DNA, 20 bp, Artificial
  20-mer unique DNA sequence
aggcacccgaagaagaccct

SEQ ID NO: 4345 - DNA, 20 bp, Artificial
  20-mer unique DNA sequence
gaactctccgcccacacgct

SEQ ID NO: 4346 - DNA, 20 bp, Artificial
  20-mer unique DNA sequence
gggagggcgttcagggagat

SEQ ID NO: 4347 - DNA, 20 bp, Artificial
  20-mer unique DNA sequence
ccccaaacccccttacgacc

SEQ ID NO: 4348 - DNA, 20 bp, Artificial
  20-mer unique DNA sequence
gcaggggcgggcaacagaaa

SEQ ID NO: 4349 - DNA, 20 bp, Artificial
  20-mer unique DNA sequence
atgggggggacaataagggc

SEQ ID NO: 4350 - DNA, 20 bp, Artificial
  20-mer unique DNA sequence
ccggacctcaccccatttgc

SEQ ID NO: 4351 - DNA, 20 bp, Artificial
  20-mer unique DNA sequence
gaagtgctgaaccgcgtccg

SEQ ID NO: 4352 - DNA, 20 bp, Artificial
  20-mer unique DNA sequence
aaaatggcactgggcgagcg

SEQ ID NO: 4353 - DNA, 20 bp, Artificial
  20-mer unique DNA sequence
gccccgtagctcacattgcg

SEQ ID NO: 4354 - DNA, 20 bp, Artificial
  20-mer unique DNA sequence
tccaagccaccgagccaacc

SEQ ID NO: 4355 - DNA, 20 bp, Artificial
  20-mer unique DNA sequence
gccgtgggactcttcgttgg

SEQ ID NO: 4356 - DNA, 20 bp, Artificial
  20-mer unique DNA sequence
tctcttcaggtacggcgcgc

SEQ ID NO: 4357 - DNA, 20 bp, Artificial
  20-mer unique DNA sequence
atcaccgtcgccctccagcc

SEQ ID NO: 4358 - DNA, 20 bp, Artificial
  20-mer unique DNA sequence
ggcgcgtgtagcagtgatcg

SEQ ID NO: 4359 - DNA, 20 bp, Artificial
  20-mer unique DNA sequence
ctgggggtgctcggttcgaa

SEQ ID NO: 4360 - DNA, 20 bp, Artificial
  20-mer unique DNA sequence
agccaggcgcggtcctataa

SEQ ID NO: 4361 - DNA, 20 bp, Artificial
  20-mer unique DNA sequence
aatgcccgggccacatcgtt

SEQ ID NO: 4362 - DNA, 20 bp, Artificial
  20-mer unique DNA sequence
ttaaaacgtcccccacgccg

SEQ ID NO: 4363 - DNA, 20 bp, Artificial
  20-mer unique DNA sequence
gcccaggaagggggtgtgtc

SEQ ID NO: 4364 - DNA, 20 bp, Artificial
  20-mer unique DNA sequence
cacgcaccccccaacttcat

SEQ ID NO: 4365 - DNA, 20 bp, Artificial
  20-mer unique DNA sequence
cgtggggggttccttctctg

SEQ ID NO: 4366 - DNA, 20 bp, Artificial
  20-mer unique DNA sequence
ggtttgcgccttcccttttg

SEQ ID NO: 4367 - DNA, 20 bp, Artificial
  20-mer unique DNA sequence
gtcacccccttacatgcgcg

SEQ ID NO: 4368 - DNA, 20 bp, Artificial
  20-mer unique DNA sequence
aagcttccccggctggtgtc

SEQ ID NO: 4369 - DNA, 20 bp, Artificial
  20-mer unique DNA sequence
ggcccaccgactcgacgact

SEQ ID NO: 4370 - DNA, 20 bp, Artificial
  20-mer unique DNA sequence
ccgggtgcgtcagaggggat

SEQ ID NO: 4371 - DNA, 20 bp, Artificial
  20-mer unique DNA sequence
tggcatctttacgacggcga

SEQ ID NO: 4372 - DNA, 20 bp, Artificial
  20-mer unique DNA sequence
gggtgtcggggcgtgtaaaa

SEQ ID NO: 4373 - DNA, 20 bp, Artificial
  20-mer unique DNA sequence
gttcattacgtgccgcgggg

SEQ ID NO: 4374 - DNA, 20 bp, Artificial
  20-mer unique DNA sequence
ttaaacccaagcgccaagca

SEQ ID NO: 4375 - DNA, 20 bp, Artificial
  20-mer unique DNA sequence
cgggcgggacaagcaaattc

SEQ ID NO: 4376 - DNA, 20 bp, Artificial
  20-mer unique DNA sequence
cttcaatgggcacgggcact

SEQ ID NO: 4377 - DNA, 20 bp, Artificial
  20-mer unique DNA sequence
cgatcacaccgcgccaatat

SEQ ID NO: 4378 - DNA, 20 bp, Artificial
  20-mer unique DNA sequence
ctcgtcttaggcccgttccg

SEQ ID NO: 4379 - DNA, 20 bp, Artificial
  20-mer unique DNA sequence
cccacaagacggcctgcaaa

SEQ ID NO: 4380 - DNA, 20 bp, Artificial
  20-mer unique DNA sequence
actggctcctttgctgcggg

SEQ ID NO: 4381 - DNA, 20 bp, Artificial
  20-mer unique DNA sequence
tctcgcgcccctatgcccta

SEQ ID NO: 4382 - DNA, 20 bp, Artificial
  20-mer unique DNA sequence
accgacctcatgctccacgc

SEQ ID NO: 4383 - DNA, 20 bp, Artificial
  20-mer unique DNA sequence
ggcacccaatgacagagccc

SEQ ID NO: 4384 - DNA, 20 bp, Artificial
  20-mer unique DNA sequence
atccgatgcggcctcacctg

SEQ ID NO: 4385 - DNA, 20 bp, Artificial
  20-mer unique DNA sequence
gatgaagagtgcggcgcgtg

SEQ ID NO: 4386 - DNA, 20 bp, Artificial
  20-mer unique DNA sequence
accgcttcgaaaaccccttg

SEQ ID NO: 4387 - DNA, 20 bp, Artificial
  20-mer unique DNA sequence
gcgccggcctcagagtttcg

SEQ ID NO: 4388 - DNA, 20 bp, Artificial
  20-mer unique DNA sequence
ggcaccgcctcgtgttattc

SEQ ID NO: 4389 - DNA, 20 bp, Artificial
  20-mer unique DNA sequence
cgacaatacgaagcggcggg

SEQ ID NO: 4390 - DNA, 20 bp, Artificial
  20-mer unique DNA sequence
agcatagcccaagcgcgagg

SEQ ID NO: 4391 - DNA, 20 bp, Artificial
  20-mer unique DNA sequence
ccatgttctttcgccccggt

SEQ ID NO: 4392 - DNA, 20 bp, Artificial
  20-mer unique DNA sequence
cgcgtgtgcgtatgggttgc

SEQ ID NO: 4393 - DNA, 20 bp, Artificial
  20-mer unique DNA sequence
gacgctttgcggaggacatg

SEQ ID NO: 4394 - DNA, 20 bp, Artificial
  20-mer unique DNA sequence
ggtcgggccacggttatgac

SEQ ID NO: 4395 - DNA, 20 bp, Artificial
  20-mer unique DNA sequence
cgtacgcatcgcggaggaag

SEQ ID NO: 4396 - DNA, 20 bp, Artificial
  20-mer unique DNA sequence
catccgacccgcaagcaaaa

SEQ ID NO: 4397 - DNA, 20 bp, Artificial
  20-mer unique DNA sequence
tgggggcgagaagcaggtat

SEQ ID NO: 4398 - DNA, 20 bp, Artificial
  20-mer unique DNA sequence
cctttcatgcccgcgtctgc

SEQ ID NO: 4399 - DNA, 20 bp, Artificial
  20-mer unique DNA sequence
tgacgcccgtgacgacactc

SEQ ID NO: 4400 - DNA, 20 bp, Artificial
  20-mer unique DNA sequence
cgtctgcccatcgttcccaa

SEQ ID NO: 4401 - DNA, 20 bp, Artificial
  20-mer unique DNA sequence
cactacccgcccgttcaagc

SEQ ID NO: 4402 - DNA, 20 bp, Artificial
  20-mer unique DNA sequence
gtacacacactggccccccc

SEQ ID NO: 4403 - DNA, 20 bp, Artificial
  20-mer unique DNA sequence
gcgcaggccatctaacccag

SEQ ID NO: 4404 - DNA, 20 bp, Artificial
  20-mer unique DNA sequence
atggggtgcagggtaagccg

SEQ ID NO: 4405 - DNA, 20 bp, Artificial
  20-mer unique DNA sequence
gcaccccctcatgacaccct

SEQ ID NO: 4406 - DNA, 20 bp, Artificial
  20-mer unique DNA sequence
ggccttgtttgcgggtcgtc

SEQ ID NO: 4407 - DNA, 20 bp, Artificial
  20-mer unique DNA sequence
gcctgggtcttcggggatcg

SEQ ID NO: 4408 - DNA, 20 bp, Artificial
  20-mer unique DNA sequence
aagatccagcccggcaaaac

SEQ ID NO: 4409 - DNA, 20 bp, Artificial
  20-mer unique DNA sequence
cttgcaaaacgccagccgct

SEQ ID NO: 4410 - DNA, 20 bp, Artificial
  20-mer unique DNA sequence
tagttcggctggggtgcaga

SEQ ID NO: 4411 - DNA, 20 bp, Artificial
  20-mer unique DNA sequence
attagcgggtgcgtgtgggt

SEQ ID NO: 4412 - DNA, 20 bp, Artificial
  20-mer unique DNA sequence
cctgcccccttggagcctgt

SEQ ID NO: 4413 - DNA, 20 bp, Artificial
  20-mer unique DNA sequence
gacccccctgtctgcgaacc

SEQ ID NO: 4414 - DNA, 20 bp, Artificial
  20-mer unique DNA sequence
acagatccaccgaggccgcc

SEQ ID NO: 4415 - DNA, 20 bp, Artificial
  20-mer unique DNA sequence
ccgttggaagcccgattgat

SEQ ID NO: 4416 - DNA, 20 bp, Artificial
  20-mer unique DNA sequence
gcatctgcaggctaagccac

SEQ ID NO: 4417 - DNA, 20 bp, Artificial
  20-mer unique DNA sequence
aatcagagcgctcgcaaacc

SEQ ID NO: 4418 - DNA, 20 bp, Artificial
  20-mer unique DNA sequence
ccgttacgtcggctgtacaa

SEQ ID NO: 4419 - DNA, 20 bp, Artificial
  20-mer unique DNA sequence
gggaccccaacctgctacaa

SEQ ID NO: 4420 - DNA, 20 bp, Artificial
  20-mer unique DNA sequence
cggcctagtgcgatgagcta

SEQ ID NO: 4421 - DNA, 20 bp, Artificial
  20-mer unique DNA sequence
gccgcagtcacgtggatgtt

SEQ ID NO: 4422 - DNA, 20 bp, Artificial
  20-mer unique DNA sequence
ggggggggagaggaaagctt

SEQ ID NO: 4423 - DNA, 20 bp, Artificial
  20-mer unique DNA sequence
gcgtatctccggcagcttga

SEQ ID NO: 4424 - DNA, 20 bp, Artificial
  20-mer unique DNA sequence
ctagcgctcccactcccgac

SEQ ID NO: 4425 - DNA, 20 bp, Artificial
  20-mer unique DNA sequence
cagagagagagcgcgtgggc

SEQ ID NO: 4426 - DNA, 20 bp, Artificial
  20-mer unique DNA sequence
atcccccgaaacactccctg

SEQ ID NO: 4427 - DNA, 20 bp, Artificial
  20-mer unique DNA sequence
tgtctgtggcttggcggtga

SEQ ID NO: 4428 - DNA, 20 bp, Artificial
  20-mer unique DNA sequence
ttgttcgtgattgcgccccc

SEQ ID NO: 4429 - DNA, 20 bp, Artificial
  20-mer unique DNA sequence
taactacgtgcgagcgcctc

SEQ ID NO: 4430 - DNA, 20 bp, Artificial
  20-mer unique DNA sequence
agggcggagggaaatcggat

SEQ ID NO: 4431 - DNA, 20 bp, Artificial
  20-mer unique DNA sequence
gaaccggagagaaacggggg

SEQ ID NO: 4432 - DNA, 20 bp, Artificial
  20-mer unique DNA sequence
cactgattggggctgagggg

SEQ ID NO: 4433 - DNA, 20 bp, Artificial
  20-mer unique DNA sequence
ccccttgccttagccccttg

SEQ ID NO: 4434 - DNA, 20 bp, Artificial
  20-mer unique DNA sequence
aggtcgtgggattgggtggt

SEQ ID NO: 4435 - DNA, 20 bp, Artificial
  20-mer unique DNA sequence
tatcccaacgggcccgagta

SEQ ID NO: 4436 - DNA, 20 bp, Artificial
  20-mer unique DNA sequence
ctcgccaatgtacgctccgg

SEQ ID NO: 4437 - DNA, 20 bp, Artificial
  20-mer unique DNA sequence
aacgaccgaaccgcaacaca

SEQ ID NO: 4438 - DNA, 20 bp, Artificial
  20-mer unique DNA sequence
cctttttgcctcagtcccgc

SEQ ID NO: 4439 - DNA, 20 bp, Artificial
  20-mer unique DNA sequence
ttggttggggtttccgctgc

SEQ ID NO: 4440 - DNA, 20 bp, Artificial
  20-mer unique DNA sequence
cccacgcggggtaaacagat

SEQ ID NO: 4441 - DNA, 20 bp, Artificial
  20-mer unique DNA sequence
ttgagaatgtcccgcgctgt

SEQ ID NO: 4442 - DNA, 20 bp, Artificial
  20-mer unique DNA sequence
atcgcccctgcaccgtttga

SEQ ID NO: 4443 - DNA, 20 bp, Artificial
  20-mer unique DNA sequence
aaccaattagcgcgcgacga

SEQ ID NO: 4444 - DNA, 20 bp, Artificial
  20-mer unique DNA sequence
tttaagccccaccgccagac

SEQ ID NO: 4445 - DNA, 20 bp, Artificial
  20-mer unique DNA sequence
gtagttcgatccccgcccca

SEQ ID NO: 4446 - DNA, 20 bp, Artificial
  20-mer unique DNA sequence
gggaggaatggggcgacgat

SEQ ID NO: 4447 - DNA, 20 bp, Artificial
  20-mer unique DNA sequence
attgcgccaaacgagcagtg

SEQ ID NO: 4448 - DNA, 20 bp, Artificial
  20-mer unique DNA sequence
gtcgatacgggcgtcgatga

SEQ ID NO: 4449 - DNA, 20 bp, Artificial
  20-mer unique DNA sequence
gcggctgggtcctgatacaa

SEQ ID NO: 4450 - DNA, 20 bp, Artificial
  20-mer unique DNA sequence
gcgggctaatccaaggacga

SEQ ID NO: 4451 - DNA, 20 bp, Artificial
  20-mer unique DNA sequence
gccagcccgcacgaatctaa

SEQ ID NO: 4452 - DNA, 20 bp, Artificial
  20-mer unique DNA sequence
agggggctcaagggctcagg

SEQ ID NO: 4453 - DNA, 20 bp, Artificial
  20-mer unique DNA sequence
ggtcggtgatggctttgcga

SEQ ID NO: 4454 - DNA, 20 bp, Artificial
  20-mer unique DNA sequence
aagaaggatgggttgcgggc

SEQ ID NO: 4455 - DNA, 20 bp, Artificial
  20-mer unique DNA sequence
gagcgggagggtggatgatg

SEQ ID NO: 4456 - DNA, 20 bp, Artificial
  20-mer unique DNA sequence
caaagtccacggtccccagg

SEQ ID NO: 4457 - DNA, 20 bp, Artificial
  20-mer unique DNA sequence
gcacgggcgagttctttggc

SEQ ID NO: 4458 - DNA, 20 bp, Artificial
  20-mer unique DNA sequence
attcccttgccccactgacc

SEQ ID NO: 4459 - DNA, 20 bp, Artificial
  20-mer unique DNA sequence
atcgcctccctccccccagt

SEQ ID NO: 4460 - DNA, 20 bp, Artificial
  20-mer unique DNA sequence
tcatggggcgtccgatttct

SEQ ID NO: 4461 - DNA, 20 bp, Artificial
  20-mer unique DNA sequence
gaaccccgccgcgaatttca

SEQ ID NO: 4462 - DNA, 20 bp, Artificial
  20-mer unique DNA sequence
ctgcccgagaccattcaccc

SEQ ID NO: 4463 - DNA, 20 bp, Artificial
  20-mer unique DNA sequence
ctggcggtctggagggtctg

SEQ ID NO: 4464 - DNA, 20 bp, Artificial
  20-mer unique DNA sequence
cacttccttgcgtgcctccg

SEQ ID NO: 4465 - DNA, 20 bp, Artificial
  20-mer unique DNA sequence
aggctgatttggcccgattg

SEQ ID NO: 4466 - DNA, 20 bp, Artificial
  20-mer unique DNA sequence
aatcggtggaatcagggggg

SEQ ID NO: 4467 - DNA, 20 bp, Artificial
  20-mer unique DNA sequence
gcattcatggccaacccctc

SEQ ID NO: 4468 - DNA, 20 bp, Artificial
  20-mer unique DNA sequence
gctgccccggttactgaccc

SEQ ID NO: 4469 - DNA, 20 bp, Artificial
  20-mer unique DNA sequence
gttttgcggtcaggccatgg

SEQ ID NO: 4470 - DNA, 20 bp, Artificial
  20-mer unique DNA sequence
cacaatccaatagggccggc

SEQ ID NO: 4471 - DNA, 20 bp, Artificial
  20-mer unique DNA sequence
tcacaaccaagatgccccgc

SEQ ID NO: 4472 - DNA, 20 bp, Artificial
  20-mer unique DNA sequence
ctgagaccgcgcaacacgga

SEQ ID NO: 4473 - DNA, 20 bp, Artificial
  20-mer unique DNA sequence
tgcgccgtagcagaatgagc

SEQ ID NO: 4474 - DNA, 20 bp, Artificial
  20-mer unique DNA sequence
cgcacgagagacccccactg

SEQ ID NO: 4475 - DNA, 20 bp, Artificial
  20-mer unique DNA sequence
tggtctccgctcgttttggg

SEQ ID NO: 4476 - DNA, 20 bp, Artificial
  20-mer unique DNA sequence
tgcaagctaaagggggcggc

SEQ ID NO: 4477 - DNA, 20 bp, Artificial
  20-mer unique DNA sequence
cggcaggtgaggacaatagg

SEQ ID NO: 4478 - DNA, 20 bp, Artificial
  20-mer unique DNA sequence
ggcgcggtccattgcaactt

SEQ ID NO: 4479 - DNA, 20 bp, Artificial
  20-mer unique DNA sequence
gagctgtggggcatgtggca

SEQ ID NO: 4480 - DNA, 20 bp, Artificial
  20-mer unique DNA sequence
cgcagggacattgggcttca

SEQ ID NO: 4481 - DNA, 20 bp, Artificial
  20-mer unique DNA sequence
ggaaggggccgaaaacgcag

SEQ ID NO: 4482 - DNA, 20 bp, Artificial
  20-mer unique DNA sequence
tgacagcatcctgcaggcca

SEQ ID NO: 4483 - DNA, 20 bp, Artificial
  20-mer unique DNA sequence
cagactcaactggcctgggt

SEQ ID NO: 4484 - DNA, 20 bp, Artificial
  20-mer unique DNA sequence
attaccacgggggccgactg

SEQ ID NO: 4485 - DNA, 20 bp, Artificial
  20-mer unique DNA sequence
acgaggtgtgtgtgcggagc

SEQ ID NO: 4486 - DNA, 20 bp, Artificial
  20-mer unique DNA sequence
attccgcctcgtcccagctt

SEQ ID NO: 4487 - DNA, 20 bp, Artificial
  20-mer unique DNA sequence
cgcaggccgttggcaaaact

SEQ ID NO: 4488 - DNA, 20 bp, Artificial
  20-mer unique DNA sequence
ggccccagacgtaccaggaa

SEQ ID NO: 4489 - DNA, 20 bp, Artificial
  20-mer unique DNA sequence
atcccaccttagcccccggc

SEQ ID NO: 4490 - DNA, 20 bp, Artificial
  20-mer unique DNA sequence
acaacacgacgccgccagaa

SEQ ID NO: 4491 - DNA, 20 bp, Artificial
  20-mer unique DNA sequence
ctagcttgcggccggtttgg

SEQ ID NO: 4492 - DNA, 20 bp, Artificial
  20-mer unique DNA sequence
ggcaacacttcaccgagccg

SEQ ID NO: 4493 - DNA, 20 bp, Artificial
  20-mer unique DNA sequence
gtttaccgaacccccacggc

SEQ ID NO: 4494 - DNA, 20 bp, Artificial
  20-mer unique DNA sequence
atgcagttggtcctcggcag

SEQ ID NO: 4495 - DNA, 20 bp, Artificial
  20-mer unique DNA sequence
aagccgctcgacgatcagtg

SEQ ID NO: 4496 - DNA, 20 bp, Artificial
  20-mer unique DNA sequence
cgtgcgacttagttcccggt

SEQ ID NO: 4497 - DNA, 20 bp, Artificial
  20-mer unique DNA sequence
tggagctttcgcggctacaa

SEQ ID NO: 4498 - DNA, 20 bp, Artificial
  20-mer unique DNA sequence
atagtttcgacccgccgccg

SEQ ID NO: 4499 - DNA, 20 bp, Artificial
  20-mer unique DNA sequence
gggccctttcacttgcgata

SEQ ID NO: 4500 - DNA, 20 bp, Artificial
  20-mer unique DNA sequence
atacgggggagtgggtgcga

SEQ ID NO: 4501 - DNA, 20 bp, Artificial
  20-mer unique DNA sequence
agcaaaagcgggaaagcggg

SEQ ID NO: 4502 - DNA, 20 bp, Artificial
  20-mer unique DNA sequence
acccccatgtagcccgcagt

SEQ ID NO: 4503 - DNA, 20 bp, Artificial
  20-mer unique DNA sequence
ccacggggcttgcatcacaa

SEQ ID NO: 4504 - DNA, 20 bp, Artificial
  20-mer unique DNA sequence
gcaaccaatcggctaccgcg

SEQ ID NO: 4505 - DNA, 20 bp, Artificial
  20-mer unique DNA sequence
actgcggttagactcctggc

SEQ ID NO: 4506 - DNA, 20 bp, Artificial
  20-mer unique DNA sequence
gccccttgtctggtcccgtg

SEQ ID NO: 4507 - DNA, 20 bp, Artificial
  20-mer unique DNA sequence
caccctccctcgtctgctcg

SEQ ID NO: 4508 - DNA, 20 bp, Artificial
  20-mer unique DNA sequence
attccagcagggggtgggtt

SEQ ID NO: 4509 - DNA, 20 bp, Artificial
  20-mer unique DNA sequence
ccccccccgagaaacgacta

SEQ ID NO: 4510 - DNA, 20 bp, Artificial
  20-mer unique DNA sequence
caactgcgagaaccccccga

SEQ ID NO: 4511 - DNA, 20 bp, Artificial
  20-mer unique DNA sequence
ggggccggaagggatattgt

SEQ ID NO: 4512 - DNA, 20 bp, Artificial
  20-mer unique DNA sequence
agctaccctccggggcaata

SEQ ID NO: 4513 - DNA, 20 bp, Artificial
  20-mer unique DNA sequence
tggtctgacggcgtcgatga

SEQ ID NO: 4514 - DNA, 20 bp, Artificial
  20-mer unique DNA sequence
tggacgtaacgcggctacaa

SEQ ID NO: 4515 - DNA, 20 bp, Artificial
  20-mer unique DNA sequence
acactcgcggctgagtacaa

SEQ ID NO: 4516 - DNA, 20 bp, Artificial
  20-mer unique DNA sequence
ttatggctcccacggcggtg

SEQ ID NO: 4517 - DNA, 20 bp, Artificial
  20-mer unique DNA sequence
cgatgaagggtcgtacgggg

SEQ ID NO: 4518 - DNA, 20 bp, Artificial
  20-mer unique DNA sequence
gacgatggtagcccggtgat

SEQ ID NO: 4519 - DNA, 20 bp, Artificial
  20-mer unique DNA sequence
agctcccacccctgtccatg

SEQ ID NO: 4520 - DNA, 20 bp, Artificial
  20-mer unique DNA sequence
ctacaagagcggcgacccgt

SEQ ID NO: 4521 - DNA, 20 bp, Artificial
  20-mer unique DNA sequence
tcaaatcgctcttccgcgca

SEQ ID NO: 4522 - DNA, 20 bp, Artificial
  20-mer unique DNA sequence
cgcggcataaaacggccata

SEQ ID NO: 4523 - DNA, 20 bp, Artificial
  20-mer unique DNA sequence
tgcatccgaacagaaggata

SEQ ID NO: 4524 - DNA, 20 bp, Artificial
  20-mer unique DNA sequence
cggtatcgtcccgcttgtgg

SEQ ID NO: 4525 - DNA, 20 bp, Artificial
  20-mer unique DNA sequence
cgctctcccgaacccgcata

SEQ ID NO: 4526 - DNA, 20 bp, Artificial
  20-mer unique DNA sequence
tctggagcgacgaggggtca

SEQ ID NO: 4527 - DNA, 20 bp, Artificial
  20-mer unique DNA sequence
tggctgagggaggggcgagt

SEQ ID NO: 4528 - DNA, 20 bp, Artificial
  20-mer unique DNA sequence
atcgcactcccccactgacc

SEQ ID NO: 4529 - DNA, 20 bp, Artificial
  20-mer unique DNA sequence
tccgacaccgcgctctcaaa

SEQ ID NO: 4530 - DNA, 20 bp, Artificial
  20-mer unique DNA sequence
ggagggctgttgaagggacg

SEQ ID NO: 4531 - DNA, 20 bp, Artificial
  20-mer unique DNA sequence
tgcgtcccatccccttctgt

SEQ ID NO: 4532 - DNA, 20 bp, Artificial
  20-mer unique DNA sequence
tttcagcgcgcccactcttt

SEQ ID NO: 4533 - DNA, 20 bp, Artificial
  20-mer unique DNA sequence
gtttcgtattcgcgacggcc

SEQ ID NO: 4534 - DNA, 20 bp, Artificial
  20-mer unique DNA sequence
cagatggcgaggagggggtg

SEQ ID NO: 4535 - DNA, 20 bp, Artificial
  20-mer unique DNA sequence
tggagtcatgggggttgcag

SEQ ID NO: 4536 - DNA, 20 bp, Artificial
  20-mer unique DNA sequence
ccataaatccctcggtgcgc

SEQ ID NO: 4537 - DNA, 20 bp, Artificial
  20-mer unique DNA sequence
ggctcgtgttggatagggcg

SEQ ID NO: 4538 - DNA, 20 bp, Artificial
  20-mer unique DNA sequence
atggccgggtgcttctggaa

SEQ ID NO: 4539 - DNA, 20 bp, Artificial
  20-mer unique DNA sequence
cacaagatcaacgccgccgc

SEQ ID NO: 4540 - DNA, 20 bp, Artificial
  20-mer unique DNA sequence
tggatgtgtacgcgccgagg

SEQ ID NO: 4541 - DNA, 20 bp, Artificial
  20-mer unique DNA sequence
ataccgcgcgcctacatagc

SEQ ID NO: 4542 - DNA, 20 bp, Artificial
  20-mer unique DNA sequence
tgggaacaagccggggaagc

SEQ ID NO: 4543 - DNA, 20 bp, Artificial
  20-mer unique DNA sequence
taggttggcgccggaggtga

SEQ ID NO: 4544 - DNA, 20 bp, Artificial
  20-mer unique DNA sequence
tgtgatgcactgtcccgcca

SEQ ID NO: 4545 - DNA, 20 bp, Artificial
  20-mer unique DNA sequence
cggccgaggtgggttggtct

SEQ ID NO: 4546 - DNA, 20 bp, Artificial
  20-mer unique DNA sequence
tccagccaaacaaagcccgc

SEQ ID NO: 4547 - DNA, 20 bp, Artificial
  20-mer unique DNA sequence
ctctcgcaacccaaccgcct

SEQ ID NO: 4548 - DNA, 20 bp, Artificial
  20-mer unique DNA sequence
ttccgccctactcgtttccg

SEQ ID NO: 4549 - DNA, 20 bp, Artificial
  20-mer unique DNA sequence
cctccggaacaaatcgcctc

SEQ ID NO: 4550 - DNA, 20 bp, Artificial
  20-mer unique DNA sequence
cccagtgaaaccccaacgca

SEQ ID NO: 4551 - DNA, 20 bp, Artificial
  20-mer unique DNA sequence
tgtcctgcctccaccattcg

SEQ ID NO: 4552 - DNA, 20 bp, Artificial
  20-mer unique DNA sequence
aactggcgtctccgtgatga

SEQ ID NO: 4553 - DNA, 20 bp, Artificial
  20-mer unique DNA sequence
ctaacgtgccggctgtacaa

SEQ ID NO: 4554 - DNA, 20 bp, Artificial
  20-mer unique DNA sequence
tagacgcgcagcggagagcc

SEQ ID NO: 4555 - DNA, 20 bp, Artificial
  20-mer unique DNA sequence
agttgggtggtgaagcggcg

SEQ ID NO: 4556 - DNA, 20 bp, Artificial
  20-mer unique DNA sequence
acctgctgcttgtgcctcgc

SEQ ID NO: 4557 - DNA, 20 bp, Artificial
  20-mer unique DNA sequence
accccccacctttgctcgag

SEQ ID NO: 4558 - DNA, 20 bp, Artificial
  20-mer unique DNA sequence
gagttcgcaaggcccccagt

SEQ ID NO: 4559 - DNA, 20 bp, Artificial
  20-mer unique DNA sequence
ccagcccccctccactctcc

SEQ ID NO: 4560 - DNA, 20 bp, Artificial
  20-mer unique DNA sequence
gagcttctgcgtggggggta

SEQ ID NO: 4561 - DNA, 20 bp, Artificial
  20-mer unique DNA sequence
gtacgccccatccaagtcgc

SEQ ID NO: 4562 - DNA, 20 bp, Artificial
  20-mer unique DNA sequence
gcgagcgacttggcggtttg

SEQ ID NO: 4563 - DNA, 20 bp, Artificial
  20-mer unique DNA sequence
atgatggggttccgcggatt

SEQ ID NO: 4564 - DNA, 20 bp, Artificial
  20-mer unique DNA sequence
ccggttctcagcgttcccat

SEQ ID NO: 4565 - DNA, 20 bp, Artificial
  20-mer unique DNA sequence
ttttgaggtcgtgtcccggc

SEQ ID NO: 4566 - DNA, 20 bp, Artificial
  20-mer unique DNA sequence
ccgcctggaacttctgctcg

SEQ ID NO: 4567 - DNA, 20 bp, Artificial
  20-mer unique DNA sequence
taaacagccgagcccccacc

SEQ ID NO: 4568 - DNA, 20 bp, Artificial
  20-mer unique DNA sequence
taccgggtctcgctgtacaa

SEQ ID NO: 4569 - DNA, 20 bp, Artificial
  20-mer unique DNA sequence
agcgaactccgtacaccctg

SEQ ID NO: 4570 - DNA, 20 bp, Artificial
  20-mer unique DNA sequence
acgctgacggctgagttaca

SEQ ID NO: 4571 - DNA, 20 bp, Artificial
  20-mer unique DNA sequence
tgtacacggcgtcacgatga

SEQ ID NO: 4572 - DNA, 20 bp, Artificial
  20-mer unique DNA sequence
ttgaagatcctcgccaccgg

SEQ ID NO: 4573 - DNA, 20 bp, Artificial
  20-mer unique DNA sequence
cagaaaacacccgcaaggca

SEQ ID NO: 4574 - DNA, 20 bp, Artificial
  20-mer unique DNA sequence
tgggcgtcacaacaggatga

SEQ ID NO: 4575 - DNA, 20 bp, Artificial
  20-mer unique DNA sequence
gcacgttgacggctgtacaa

SEQ ID NO: 4576 - DNA, 20 bp, Artificial
  20-mer unique DNA sequence
ggggctccgggcattcagtc

SEQ ID NO: 4577 - DNA, 20 bp, Artificial
  20-mer unique DNA sequence
gcccaccttccgcacgacct

SEQ ID NO: 4578 - DNA, 20 bp, Artificial
  20-mer unique DNA sequence
aggctaccgtgtactgcgac

SEQ ID NO: 4579 - DNA, 20 bp, Artificial
  20-mer unique DNA sequence
aggcgggaagggcggtgtta

SEQ ID NO: 4580 - DNA, 20 bp, Artificial
  20-mer unique DNA sequence
gcggtcgcattgttgctctc

SEQ ID NO: 4581 - DNA, 20 bp, Artificial
  20-mer unique DNA sequence
cctctgacatgcccgccgta

SEQ ID NO: 4582 - DNA, 20 bp, Artificial
  20-mer unique DNA sequence
actgacacacccccgccaaa

SEQ ID NO: 4583 - DNA, 20 bp, Artificial
  20-mer unique DNA sequence
aaggaacggcggcagaaagg

SEQ ID NO: 4584 - DNA, 20 bp, Artificial
  20-mer unique DNA sequence
aagtgtgcccccaaaccgtc

SEQ ID NO: 4585 - DNA, 20 bp, Artificial
  20-mer unique DNA sequence
cgtcccttctcgcctgtcct

SEQ ID NO: 4586 - DNA, 20 bp, Artificial
  20-mer unique DNA sequence
actggttagcgcgtcgatga

SEQ ID NO: 4587 - DNA, 20 bp, Artificial
  20-mer unique DNA sequence
ggatgctcacgcgtcgatga

SEQ ID NO: 4588 - DNA, 20 bp, Artificial
  20-mer unique DNA sequence
ccaaaacccgggatgcgcta

SEQ ID NO: 4589 - DNA, 20 bp, Artificial
  20-mer unique DNA sequence
gccgcttgttcgacgttcag

SEQ ID NO: 4590 - DNA, 20 bp, Artificial
  20-mer unique DNA sequence
cgcaacacctctccaccccg

SEQ ID NO: 4591 - DNA, 20 bp, Artificial
  20-mer unique DNA sequence
atgcccaccctgttcctccg

SEQ ID NO: 4592 - DNA, 20 bp, Artificial
  20-mer unique DNA sequence
cgccatccacgaagacacca

SEQ ID NO: 4593 - DNA, 20 bp, Artificial
  20-mer unique DNA sequence
cagcttatgatgggggcggc

SEQ ID NO: 4594 - DNA, 20 bp, Artificial
  20-mer unique DNA sequence
gatgggctcgtggggtgaga

SEQ ID NO: 4595 - DNA, 20 bp, Artificial
  20-mer unique DNA sequence
gggtgcgggagtgttgtgga

SEQ ID NO: 4596 - DNA, 20 bp, Artificial
  20-mer unique DNA sequence
cgaaccggcacggggctatt

SEQ ID NO: 4597 - DNA, 20 bp, Artificial
  20-mer unique DNA sequence
cgggattggagagcgtgcac

SEQ ID NO: 4598 - DNA, 20 bp, Artificial
  20-mer unique DNA sequence
aggtctgcacggctgtacaa

SEQ ID NO: 4599 - DNA, 20 bp, Artificial
  20-mer unique DNA sequence
atagagcgccggctgtacaa

SEQ ID NO: 4600 - DNA, 20 bp, Artificial
  20-mer unique DNA sequence
ggaaggcaattgtcggcgtg

SEQ ID NO: 4601 - DNA, 20 bp, Artificial
  20-mer unique DNA sequence
cgcccttgcgagtttgggtg

SEQ ID NO: 4602 - DNA, 20 bp, Artificial
  20-mer unique DNA sequence
tccacatctcatcgcccacg

SEQ ID NO: 4603 - DNA, 20 bp, Artificial
  20-mer unique DNA sequence
gatacttggcggggcggcta

SEQ ID NO: 4604 - DNA, 20 bp, Artificial
  20-mer unique DNA sequence
ttgagcttgactggccccgg

SEQ ID NO: 4605 - DNA, 20 bp, Artificial
  20-mer unique DNA sequence
cgggcgtacaaggggacaca

SEQ ID NO: 4606 - DNA, 20 bp, Artificial
  20-mer unique DNA sequence
ggagtgcgggcggaaaaaag

SEQ ID NO: 4607 - DNA, 20 bp, Artificial
  20-mer unique DNA sequence
ttcagtcaccacccgccgat

SEQ ID NO: 4608 - DNA, 20 bp, Artificial
  20-mer unique DNA sequence
catgaggagttcgacgggca

SEQ ID NO: 4609 - DNA, 20 bp, Artificial
  20-mer unique DNA sequence
cgcagctcaaccgtcacccc

SEQ ID NO: 4610 - DNA, 20 bp, Artificial
  20-mer unique DNA sequence
gacccgacacacgcccagga

SEQ ID NO: 4611 - DNA, 20 bp, Artificial
  20-mer unique DNA sequence
atataacgtccccgcgcctg

SEQ ID NO: 4612 - DNA, 20 bp, Artificial
  20-mer unique DNA sequence
caaaacggcgagacgggaac

SEQ ID NO: 4613 - DNA, 20 bp, Artificial
  20-mer unique DNA sequence
ttggggtgggctgctaaggt

SEQ ID NO: 4614 - DNA, 20 bp, Artificial
  20-mer unique DNA sequence
caacccgtaaaatgcgccaa

SEQ ID NO: 4615 - DNA, 20 bp, Artificial
  20-mer unique DNA sequence
gggaggggatagcgacgagc

SEQ ID NO: 4616 - DNA, 20 bp, Artificial
  20-mer unique DNA sequence
cgacagacgacgaaaccgcc

SEQ ID NO: 4617 - DNA, 20 bp, Artificial
  20-mer unique DNA sequence
gcaccacgcgaacaacccta

SEQ ID NO: 4618 - DNA, 20 bp, Artificial
  20-mer unique DNA sequence
gtcccggcgattcagagcct

SEQ ID NO: 4619 - DNA, 20 bp, Artificial
  20-mer unique DNA sequence
ggcagctgtgggaggtaccc

SEQ ID NO: 4620 - DNA, 20 bp, Artificial
  20-mer unique DNA sequence
ctccaaacaccctcccgcgt

SEQ ID NO: 4621 - DNA, 20 bp, Artificial
  20-mer unique DNA sequence
ccctgaaccccctgctatgc

SEQ ID NO: 4622 - DNA, 20 bp, Artificial
  20-mer unique DNA sequence
ggcttgctcgggggttcact

SEQ ID NO: 4623 - DNA, 20 bp, Artificial
  20-mer unique DNA sequence
aaggtggaacagcgagcccc

SEQ ID NO: 4624 - DNA, 20 bp, Artificial
  20-mer unique DNA sequence
catgcggcgtcccatgatga

SEQ ID NO: 4625 - DNA, 20 bp, Artificial
  20-mer unique DNA sequence
tgggttcaacgcggctacaa

SEQ ID NO: 4626 - DNA, 20 bp, Artificial
  20-mer unique DNA sequence
aacgcctcacctcccaacca

SEQ ID NO: 4627 - DNA, 20 bp, Artificial
  20-mer unique DNA sequence
gctgggaaagcgagggtgtc

SEQ ID NO: 4628 - DNA, 20 bp, Artificial
  20-mer unique DNA sequence
ccaggatcgcgctgctacaa

SEQ ID NO: 4629 - DNA, 20 bp, Artificial
  20-mer unique DNA sequence
gtagttcattggcgcgcagc

SEQ ID NO: 4630 - DNA, 20 bp, Artificial
  20-mer unique DNA sequence
cgggtttgagcgtgcgatta

SEQ ID NO: 4631 - DNA, 20 bp, Artificial
  20-mer unique DNA sequence
gcgcagaggttcaaaagggg

SEQ ID NO: 4632 - DNA, 20 bp, Artificial
  20-mer unique DNA sequence
acctccgcaatccgctttca

SEQ ID NO: 4633 - DNA, 20 bp, Artificial
  20-mer unique DNA sequence
tacacagccagaaccgccga

SEQ ID NO: 4634 - DNA, 20 bp, Artificial
  20-mer unique DNA sequence
tgtgttccgcctgttgcctg

SEQ ID NO: 4635 - DNA, 20 bp, Artificial
  20-mer unique DNA sequence
ggtgggaatgaggtgaggcg

SEQ ID NO: 4636 - DNA, 20 bp, Artificial
  20-mer unique DNA sequence
cagcagcccacttcctcgga

SEQ ID NO: 4637 - DNA, 20 bp, Artificial
  20-mer unique DNA sequence
gcgccggtgatttcggatct

SEQ ID NO: 4638 - DNA, 20 bp, Artificial
  20-mer unique DNA sequence
cccgatgctctcccgtccaa

SEQ ID NO: 4639 - DNA, 20 bp, Artificial
  20-mer unique DNA sequence
ggcgttattggtgctgcgag

SEQ ID NO: 4640 - DNA, 20 bp, Artificial
  20-mer unique DNA sequence
ccgttcccctcacatacgcc

SEQ ID NO: 4641 - DNA, 20 bp, Artificial
  20-mer unique DNA sequence
gattgggcgggttaggcgaa

SEQ ID NO: 4642 - DNA, 20 bp, Artificial
  20-mer unique DNA sequence
actctaggcgtcgcggatga

SEQ ID NO: 4643 - DNA, 20 bp, Artificial
  20-mer unique DNA sequence
gtctggacatccggcgatga

SEQ ID NO: 4644 - DNA, 20 bp, Artificial
  20-mer unique DNA sequence
ttggggcctcttgtcgctct

SEQ ID NO: 4645 - DNA, 20 bp, Artificial
  20-mer unique DNA sequence
aggctcatccactcgctgca

SEQ ID NO: 4646 - DNA, 20 bp, Artificial
  20-mer unique DNA sequence
aagaggggggttcgtcagca

SEQ ID NO: 4647 - DNA, 20 bp, Artificial
  20-mer unique DNA sequence
ggcggcataggcgagtaggg

SEQ ID NO: 4648 - DNA, 20 bp, Artificial
  20-mer unique DNA sequence
ctttgcctgcgcgggttcta

SEQ ID NO: 4649 - DNA, 20 bp, Artificial
  20-mer unique DNA sequence
tgcatctgcgctgaatcctt

SEQ ID NO: 4650 - DNA, 20 bp, Artificial
  20-mer unique DNA sequence
gctgggaacgggacgcaaga

SEQ ID NO: 4651 - DNA, 20 bp, Artificial
  20-mer unique DNA sequence
tggggtgcggccttctaaag

SEQ ID NO: 4652 - DNA, 20 bp, Artificial
  20-mer unique DNA sequence
cagaacatgtcgcagtgccg

SEQ ID NO: 4653 - DNA, 20 bp, Artificial
  20-mer unique DNA sequence
actgcagcccgctgctacaa

SEQ ID NO: 4654 - DNA, 20 bp, Artificial
  20-mer unique DNA sequence
tcgacatgccgcacgagtgt

SEQ ID NO: 4655 - DNA, 20 bp, Artificial
  20-mer unique DNA sequence
gctccagtcaggtgatcgct

SEQ ID NO: 4656 - DNA, 20 bp, Artificial
  20-mer unique DNA sequence
gcccccacccgaagacaagc

SEQ ID NO: 4657 - DNA, 20 bp, Artificial
  20-mer unique DNA sequence
tcggagatgaatcgggccct

SEQ ID NO: 4658 - DNA, 20 bp, Artificial
  20-mer unique DNA sequence
ttgttgtacggcgctggggc

SEQ ID NO: 4659 - DNA, 20 bp, Artificial
  20-mer unique DNA sequence
ctgaaggtttttgggggcgg

SEQ ID NO: 4660 - DNA, 20 bp, Artificial
  20-mer unique DNA sequence
ttcgttctcgcggatggttg

SEQ ID NO: 4661 - DNA, 20 bp, Artificial
  20-mer unique DNA sequence
ctgtttcgcgccacgtgtcc

SEQ ID NO: 4662 - DNA, 20 bp, Artificial
  20-mer unique DNA sequence
tggtgttgccgactgcgctt

SEQ ID NO: 4663 - DNA, 20 bp, Artificial
  20-mer unique DNA sequence
cccattggtgcacgtccggt

SEQ ID NO: 4664 - DNA, 20 bp, Artificial
  20-mer unique DNA sequence
tcaacttcgctgctgccgtg

SEQ ID NO: 4665 - DNA, 20 bp, Artificial
  20-mer unique DNA sequence
ctacgctgggtgcggaccgt

SEQ ID NO: 4666 - DNA, 20 bp, Artificial
  20-mer unique DNA sequence
cataagcgccaatcccccaa

SEQ ID NO: 4667 - DNA, 20 bp, Artificial
  20-mer unique DNA sequence
gggtggcttggatgtttggc

SEQ ID NO: 4668 - DNA, 20 bp, Artificial
  20-mer unique DNA sequence
gctaccagagaaggccgccc

SEQ ID NO: 4669 - DNA, 20 bp, Artificial
  20-mer unique DNA sequence
gccggttccgaccaactctc

SEQ ID NO: 4670 - DNA, 20 bp, Artificial
  20-mer unique DNA sequence
cgttcatccccttcaccgca

SEQ ID NO: 4671 - DNA, 20 bp, Artificial
  20-mer unique DNA sequence
tacgggggggcagttcaggg

SEQ ID NO: 4672 - DNA, 20 bp, Artificial
  20-mer unique DNA sequence
cccagccccagaacaacggt

SEQ ID NO: 4673 - DNA, 20 bp, Artificial
  20-mer unique DNA sequence
agccctttcagtccccgcct

SEQ ID NO: 4674 - DNA, 20 bp, Artificial
  20-mer unique DNA sequence
cggcgtgtgcgtagggtgtg

SEQ ID NO: 4675 - DNA, 20 bp, Artificial
  20-mer unique DNA sequence
cggcgatagtggagtttcaa

SEQ ID NO: 4676 - DNA, 20 bp, Artificial
  20-mer unique DNA sequence
accactcaatcacgcccggg

SEQ ID NO: 4677 - DNA, 20 bp, Artificial
  20-mer unique DNA sequence
ggaccgcctttacctgcccc

SEQ ID NO: 4678 - DNA, 20 bp, Artificial
  20-mer unique DNA sequence
agagcaggtttcggtgcggc

SEQ ID NO: 4679 - DNA, 20 bp, Artificial
  20-mer unique DNA sequence
acagcggggcgaaaaagtcc

SEQ ID NO: 4680 - DNA, 20 bp, Artificial
  20-mer unique DNA sequence
gttcgtgatgcccgggttga

SEQ ID NO: 4681 - DNA, 20 bp, Artificial
  20-mer unique DNA sequence
aggccccgaaacaaaccgct

SEQ ID NO: 4682 - DNA, 20 bp, Artificial
  20-mer unique DNA sequence
acgcgggtccatactgaggc

SEQ ID NO: 4683 - DNA, 20 bp, Artificial
  20-mer unique DNA sequence
atagcggcgtggtggaggca

SEQ ID NO: 4684 - DNA, 20 bp, Artificial
  20-mer unique DNA sequence
gcgagtggcaggcggacagt

SEQ ID NO: 4685 - DNA, 20 bp, Artificial
  20-mer unique DNA sequence
gcaatggggcgtcgttacct

SEQ ID NO: 4686 - DNA, 20 bp, Artificial
  20-mer unique DNA sequence
gcaggcgagggactggttgt

SEQ ID NO: 4687 - DNA, 20 bp, Artificial
  20-mer unique DNA sequence
cgtgcgtgtttgtcgctccc

SEQ ID NO: 4688 - DNA, 20 bp, Artificial
  20-mer unique DNA sequence
tgcatttctctagcgcggcg

SEQ ID NO: 4689 - DNA, 20 bp, Artificial
  20-mer unique DNA sequence
tccaggtgcgcgtttcgttc

SEQ ID NO: 4690 - DNA, 20 bp, Artificial
  20-mer unique DNA sequence
actatgcgtttggaccgggc

SEQ ID NO: 4691 - DNA, 20 bp, Artificial
  20-mer unique DNA sequence
agaggtagggcgcatggggg

SEQ ID NO: 4692 - DNA, 20 bp, Artificial
  20-mer unique DNA sequence
gctggtggactcccgtacaa

SEQ ID NO: 4693 - DNA, 20 bp, Artificial
  20-mer unique DNA sequence
catcctgggaggcgtgatga

SEQ ID NO: 4694 - DNA, 20 bp, Artificial
  20-mer unique DNA sequence
ttcgtccctgtcgtgccgcg

SEQ ID NO: 4695 - DNA, 20 bp, Artificial
  20-mer unique DNA sequence
ttcgcgggcccacatcttca

SEQ ID NO: 4696 - DNA, 20 bp, Artificial
  20-mer unique DNA sequence
aacggcgtgggaattctgcg

SEQ ID NO: 4697 - DNA, 20 bp, Artificial
  20-mer unique DNA sequence
cactggctacttgggtcgcg

SEQ ID NO: 4698 - DNA, 20 bp, Artificial
  20-mer unique DNA sequence
ccaaatatcgctgccggctg

SEQ ID NO: 4699 - DNA, 20 bp, Artificial
  20-mer unique DNA sequence
agtaacgggattggcggctg

SEQ ID NO: 4700 - DNA, 20 bp, Artificial
  20-mer unique DNA sequence
gcggcaccagaaatcgaacg

SEQ ID NO: 4701 - DNA, 20 bp, Artificial
  20-mer unique DNA sequence
atcggaaacccccaagcgtg

SEQ ID NO: 4702 - DNA, 20 bp, Artificial
  20-mer unique DNA sequence
tcccgacacgaaagcaccag

SEQ ID NO: 4703 - DNA, 20 bp, Artificial
  20-mer unique DNA sequence
cgctataggtccgccccgaa

SEQ ID NO: 4704 - DNA, 20 bp, Artificial
  20-mer unique DNA sequence
agctttgagtgtccccggtg

SEQ ID NO: 4705 - DNA, 20 bp, Artificial
  20-mer unique DNA sequence
tggggaacggagccacatgt

SEQ ID NO: 4706 - DNA, 20 bp, Artificial
  20-mer unique DNA sequence
cagcagcggaaagggcgaat

SEQ ID NO: 4707 - DNA, 20 bp, Artificial
  20-mer unique DNA sequence
tggtggtgtcccggtggtct

SEQ ID NO: 4708 - DNA, 20 bp, Artificial
  20-mer unique DNA sequence
caggaggtgggacgcaaagc

SEQ ID NO: 4709 - DNA, 20 bp, Artificial
  20-mer unique DNA sequence
gcccaacccgacatcttccc

SEQ ID NO: 4710 - DNA, 20 bp, Artificial
  20-mer unique DNA sequence
tgatggatagctcgccgggt

SEQ ID NO: 4711 - DNA, 20 bp, Artificial
  20-mer unique DNA sequence
ggagattggcggggatgtgg

SEQ ID NO: 4712 - DNA, 20 bp, Artificial
  20-mer unique DNA sequence
ggtaagcatgcggtgggcct

SEQ ID NO: 4713 - DNA, 20 bp, Artificial
  20-mer unique DNA sequence
tagcaaggggccggtcgaaa

SEQ ID NO: 4714 - DNA, 20 bp, Artificial
  20-mer unique DNA sequence
agggggcgtgggattgaaag

SEQ ID NO: 4715 - DNA, 20 bp, Artificial
  20-mer unique DNA sequence
cacaacggaagggcagcaag

SEQ ID NO: 4716 - DNA, 20 bp, Artificial
  20-mer unique DNA sequence
cgaaacgagacgggcgagaa

SEQ ID NO: 4717 - DNA, 20 bp, Artificial
  20-mer unique DNA sequence
tcggacgggcagggactact

SEQ ID NO: 4718 - DNA, 20 bp, Artificial
  20-mer unique DNA sequence
acttcacgtgctgctcccga

SEQ ID NO: 4719 - DNA, 20 bp, Artificial
  20-mer unique DNA sequence
acttgtgcagggttcggccg

SEQ ID NO: 4720 - DNA, 20 bp, Artificial
  20-mer unique DNA sequence
ctgcttgggctggagttgcg

SEQ ID NO: 4721 - DNA, 20 bp, Artificial
  20-mer unique DNA sequence
gtcgtctcccttcgctccca

SEQ ID NO: 4722 - DNA, 20 bp, Artificial
  20-mer unique DNA sequence
cggatagagggcgacagggt

SEQ ID NO: 4723 - DNA, 20 bp, Artificial
  20-mer unique DNA sequence
taaagtatgggacgcgcggc

SEQ ID NO: 4724 - DNA, 20 bp, Artificial
  20-mer unique DNA sequence
tctccacgccaccccctaac

SEQ ID NO: 4725 - DNA, 20 bp, Artificial
  20-mer unique DNA sequence
gcgtggatttgcggggtgtt

SEQ ID NO: 4726 - DNA, 20 bp, Artificial
  20-mer unique DNA sequence
aatgtggctagggttcggcg

SEQ ID NO: 4727 - DNA, 20 bp, Artificial
  20-mer unique DNA sequence
agcctgccgctcctggctag

SEQ ID NO: 4728 - DNA, 20 bp, Artificial
  20-mer unique DNA sequence
acaataaccccccctgccga

SEQ ID NO: 4729 - DNA, 20 bp, Artificial
  20-mer unique DNA sequence
ccgccccgtacaagccagaa

SEQ ID NO: 4730 - DNA, 20 bp, Artificial
  20-mer unique DNA sequence
ctccggcattgtaacgctgc

SEQ ID NO: 4731 - DNA, 20 bp, Artificial
  20-mer unique DNA sequence
ggcgaatgtggggcggaaat

SEQ ID NO: 4732 - DNA, 20 bp, Artificial
  20-mer unique DNA sequence
tggtgtcttctgagggggcg

SEQ ID NO: 4733 - DNA, 20 bp, Artificial
  20-mer unique DNA sequence
aggcccaggatgcaccaacg

SEQ ID NO: 4734 - DNA, 20 bp, Artificial
  20-mer unique DNA sequence
tttcaccccgtcctcggtct

SEQ ID NO: 4735 - DNA, 20 bp, Artificial
  20-mer unique DNA sequence
cctcgccccgcctcctgaaa

SEQ ID NO: 4736 - DNA, 20 bp, Artificial
  20-mer unique DNA sequence
acagcgggaggcactatcgg

SEQ ID NO: 4737 - DNA, 20 bp, Artificial
  20-mer unique DNA sequence
gcccccatccctagtcccag

SEQ ID NO: 4738 - DNA, 20 bp, Artificial
  20-mer unique DNA sequence
atgggcgttccgtgagtgtg

SEQ ID NO: 4739 - DNA, 20 bp, Artificial
  20-mer unique DNA sequence
ctggggacattgggaacggc

SEQ ID NO: 4740 - DNA, 20 bp, Artificial
  20-mer unique DNA sequence
accggcaaagcaaccacctc

SEQ ID NO: 4741 - DNA, 20 bp, Artificial
  20-mer unique DNA sequence
tttatcgaggccaacgcgca

SEQ ID NO: 4742 - DNA, 20 bp, Artificial
  20-mer unique DNA sequence
tggtagtcgcgggggaaatg

SEQ ID NO: 4743 - DNA, 20 bp, Artificial
  20-mer unique DNA sequence
cggttgggctcggtggattc

SEQ ID NO: 4744 - DNA, 20 bp, Artificial
  20-mer unique DNA sequence
acccgcagaaatgcaaccct

SEQ ID NO: 4745 - DNA, 20 bp, Artificial
  20-mer unique DNA sequence
gtctaacgcgagcggggagt

SEQ ID NO: 4746 - DNA, 20 bp, Artificial
  20-mer unique DNA sequence
ttgcgggggccttcattggt

SEQ ID NO: 4747 - DNA, 20 bp, Artificial
  20-mer unique DNA sequence
cgcgttcaggctcagggtgc

SEQ ID NO: 4748 - DNA, 20 bp, Artificial
  20-mer unique DNA sequence
gaaggccccgtgtgtcgagc

SEQ ID NO: 4749 - DNA, 20 bp, Artificial
  20-mer unique DNA sequence
ccaccaattgctgccccttg

SEQ ID NO: 4750 - DNA, 20 bp, Artificial
  20-mer unique DNA sequence
tgggggttctcacgtgggct

SEQ ID NO: 4751 - DNA, 20 bp, Artificial
  20-mer unique DNA sequence
gtgcccgaattcaagccagg

SEQ ID NO: 4752 - DNA, 20 bp, Artificial
  20-mer unique DNA sequence
catacctcggcgtcggatga

SEQ ID NO: 4753 - DNA, 20 bp, Artificial
  20-mer unique DNA sequence
gatgtgacgggcggtcgatg

SEQ ID NO: 4754 - DNA, 20 bp, Artificial
  20-mer unique DNA sequence
cggaggaacgccaattgaca

SEQ ID NO: 4755 - DNA, 20 bp, Artificial
  20-mer unique DNA sequence
ccgacaaccgcaccaaccgt

SEQ ID NO: 4756 - DNA, 20 bp, Artificial
  20-mer unique DNA sequence
agtggcgtggaaggggagca

SEQ ID NO: 4757 - DNA, 20 bp, Artificial
  20-mer unique DNA sequence
tctttcgtggttctcccgcc

SEQ ID NO: 4758 - DNA, 20 bp, Artificial
  20-mer unique DNA sequence
ggaaggtgggatgaaagtcg

SEQ ID NO: 4759 - DNA, 20 bp, Artificial
  20-mer unique DNA sequence
tgaaggagtcgcaaaatcga

SEQ ID NO: 4760 - DNA, 20 bp, Artificial
  20-mer unique DNA sequence
cgctcacccttgctttgccg

SEQ ID NO: 4761 - DNA, 20 bp, Artificial
  20-mer unique DNA sequence
gtgggggcaagcggataaag

SEQ ID NO: 4762 - DNA, 20 bp, Artificial
  20-mer unique DNA sequence
ctgcgccttttgggggaacg

SEQ ID NO: 4763 - DNA, 20 bp, Artificial
  20-mer unique DNA sequence
accggaacagcaccctccaa

SEQ ID NO: 4764 - DNA, 20 bp, Artificial
  20-mer unique DNA sequence
gcgggcggtagaaagacggg

SEQ ID NO: 4765 - DNA, 20 bp, Artificial
  20-mer unique DNA sequence
ggggaggaatcggtgaagcc

SEQ ID NO: 4766 - DNA, 20 bp, Artificial
  20-mer unique DNA sequence
tcacgtacggacccggcaat

SEQ ID NO: 4767 - DNA, 20 bp, Artificial
  20-mer unique DNA sequence
attgcctaacggtgcccgaa

SEQ ID NO: 4768 - DNA, 20 bp, Artificial
  20-mer unique DNA sequence
ggacgcctttacgagccagg

SEQ ID NO: 4769 - DNA, 20 bp, Artificial
  20-mer unique DNA sequence
gcatcggtgccctaacaggc

SEQ ID NO: 4770 - DNA, 20 bp, Artificial
  20-mer unique DNA sequence
gcccctcattgtcacgccat

SEQ ID NO: 4771 - DNA, 20 bp, Artificial
  20-mer unique DNA sequence
acggtgggagtggagacggg

SEQ ID NO: 4772 - DNA, 20 bp, Artificial
  20-mer unique DNA sequence
cccacaaccccccccaagag

SEQ ID NO: 4773 - DNA, 20 bp, Artificial
  20-mer unique DNA sequence
gaataacggggcttggggca

SEQ ID NO: 4774 - DNA, 20 bp, Artificial
  20-mer unique DNA sequence
cccgcattaccgccactctc

SEQ ID NO: 4775 - DNA, 20 bp, Artificial
  20-mer unique DNA sequence
gccgtgtgctttcgctgtgt

SEQ ID NO: 4776 - DNA, 20 bp, Artificial
  20-mer unique DNA sequence
tgcgtgggtaaagtgtacgg

SEQ ID NO: 4777 - DNA, 20 bp, Artificial
  20-mer unique DNA sequence
ggatgtgctcgccgtgagtc

SEQ ID NO: 4778 - DNA, 20 bp, Artificial
  20-mer unique DNA sequence
gaacctccccggtcagctgc

SEQ ID NO: 4779 - DNA, 20 bp, Artificial
  20-mer unique DNA sequence
cagtaccgccttctccgcct

SEQ ID NO: 4780 - DNA, 20 bp, Artificial
  20-mer unique DNA sequence
tcaactagccccaccgaccc

SEQ ID NO: 4781 - DNA, 20 bp, Artificial
  20-mer unique DNA sequence
gttccccccgtgatcgacaa

SEQ ID NO: 4782 - DNA, 20 bp, Artificial
  20-mer unique DNA sequence
catcccacgcacagaaacaa

SEQ ID NO: 4783 - DNA, 20 bp, Artificial
  20-mer unique DNA sequence
atttcgtcttgcggggcttc

SEQ ID NO: 4784 - DNA, 20 bp, Artificial
  20-mer unique DNA sequence
gtggtgctgctgctcgggaa

SEQ ID NO: 4785 - DNA, 20 bp, Artificial
  20-mer unique DNA sequence
gtccccatcatcaccgcgtt

SEQ ID NO: 4786 - DNA, 20 bp, Artificial
  20-mer unique DNA sequence
cgcccgcatgcttattctca

SEQ ID NO: 4787 - DNA, 20 bp, Artificial
  20-mer unique DNA sequence
tgtcgcctaggccccaaaga

SEQ ID NO: 4788 - DNA, 20 bp, Artificial
  20-mer unique DNA sequence
atactcgccgagggaacgcg

SEQ ID NO: 4789 - DNA, 20 bp, Artificial
  20-mer unique DNA sequence
tggctttaccgagacggcgg

SEQ ID NO: 4790 - DNA, 20 bp, Artificial
  20-mer unique DNA sequence
aaatttttgcgggaaggggg

SEQ ID NO: 4791 - DNA, 20 bp, Artificial
  20-mer unique DNA sequence
gtacccgccttcacccaccg

SEQ ID NO: 4792 - DNA, 20 bp, Artificial
  20-mer unique DNA sequence
cttgaagtcgtccgccgtgc

SEQ ID NO: 4793 - DNA, 20 bp, Artificial
  20-mer unique DNA sequence
gccttgtgcgccgttctctt

SEQ ID NO: 4794 - DNA, 20 bp, Artificial
  20-mer unique DNA sequence
tgcgctgtgcctcgtgattg

SEQ ID NO: 4795 - DNA, 20 bp, Artificial
  20-mer unique DNA sequence
cctagaaaccacggtcagag

SEQ ID NO: 4796 - DNA, 20 bp, Artificial
  20-mer unique DNA sequence
gagctgctgcacacccccag

SEQ ID NO: 4797 - DNA, 20 bp, Artificial
  20-mer unique DNA sequence
ttatcggaaatcggccacgc

SEQ ID NO: 4798 - DNA, 20 bp, Artificial
  20-mer unique DNA sequence
cccaccctctcaccctcgct

SEQ ID NO: 4799 - DNA, 20 bp, Artificial
  20-mer unique DNA sequence
tgcggaatcggtggttcggt

SEQ ID NO: 4800 - DNA, 20 bp, Artificial
  20-mer unique DNA sequence
gtggcggtcgggcgtttaga

SEQ ID NO: 4801 - DNA, 20 bp, Artificial
  20-mer unique DNA sequence
gaacaaatgaggggcgggca

SEQ ID NO: 4802 - DNA, 20 bp, Artificial
  20-mer unique DNA sequence
ctagccaacgaccccctccg

SEQ ID NO: 4803 - DNA, 20 bp, Artificial
  20-mer unique DNA sequence
gagtcgccgggttaagtggg

SEQ ID NO: 4804 - DNA, 20 bp, Artificial
  20-mer unique DNA sequence
gttcaatgctccgccacgca

SEQ ID NO: 4805 - DNA, 20 bp, Artificial
  20-mer unique DNA sequence
accccgccccgtatcctatc

SEQ ID NO: 4806 - DNA, 20 bp, Artificial
  20-mer unique DNA sequence
aaagggacgacggcagggat

SEQ ID NO: 4807 - DNA, 20 bp, Artificial
  20-mer unique DNA sequence
aacacaatcatcgcccccca

SEQ ID NO: 4808 - DNA, 20 bp, Artificial
  20-mer unique DNA sequence
tcccttgttcgcgccactgt

SEQ ID NO: 4809 - DNA, 20 bp, Artificial
  20-mer unique DNA sequence
acggatcagcgcccagaagg

SEQ ID NO: 4810 - DNA, 20 bp, Artificial
  20-mer unique DNA sequence
tcttgttcctgtcgcgtgtg

SEQ ID NO: 4811 - DNA, 20 bp, Artificial
  20-mer unique DNA sequence
cgccacgcctcacaccatgt

SEQ ID NO: 4812 - DNA, 20 bp, Artificial
  20-mer unique DNA sequence
tggaccccgcgcaatctgag

SEQ ID NO: 4813 - DNA, 20 bp, Artificial
  20-mer unique DNA sequence
acttgcgtctggcgggctac

SEQ ID NO: 4814 - DNA, 20 bp, Artificial
  20-mer unique DNA sequence
cgctgacaaaagcctcggcc

SEQ ID NO: 4815 - DNA, 20 bp, Artificial
  20-mer unique DNA sequence
gagcagtcgcaacccaccgg

SEQ ID NO: 4816 - DNA, 20 bp, Artificial
  20-mer unique DNA sequence
cagagtggcgcaacgacggt

SEQ ID NO: 4817 - DNA, 20 bp, Artificial
  20-mer unique DNA sequence
cgcaggccgctacgtcattc

SEQ ID NO: 4818 - DNA, 20 bp, Artificial
  20-mer unique DNA sequence
acgctcgcacaccccactca

SEQ ID NO: 4819 - DNA, 20 bp, Artificial
  20-mer unique DNA sequence
tcctgtttggcctggctgga

SEQ ID NO: 4820 - DNA, 20 bp, Artificial
  20-mer unique DNA sequence
atgggaagggtgcactgcgg

SEQ ID NO: 4821 - DNA, 20 bp, Artificial
  20-mer unique DNA sequence
gggcctcgacggaactagca

SEQ ID NO: 4822 - DNA, 20 bp, Artificial
  20-mer unique DNA sequence
cggtcaagaatcggcatggg

SEQ ID NO: 4823 - DNA, 20 bp, Artificial
  20-mer unique DNA sequence
caaaaaggggcgagagcggc

SEQ ID NO: 4824 - DNA, 20 bp, Artificial
  20-mer unique DNA sequence
ccgcaataccgcgttaccct

SEQ ID NO: 4825 - DNA, 20 bp, Artificial
  20-mer unique DNA sequence
ttcggaagggagaagccgcc

SEQ ID NO: 4826 - DNA, 20 bp, Artificial
  20-mer unique DNA sequence
gactcggggcttgggtgaag

SEQ ID NO: 4827 - DNA, 20 bp, Artificial
  20-mer unique DNA sequence
atctgtcggtcggctcctgg

SEQ ID NO: 4828 - DNA, 20 bp, Artificial
  20-mer unique DNA sequence
tgtgtcacgcaggtgcacta

SEQ ID NO: 4829 - DNA, 20 bp, Artificial
  20-mer unique DNA sequence
accatccggacggctctttg

SEQ ID NO: 4830 - DNA, 20 bp, Artificial
  20-mer unique DNA sequence
gcgggacctttgctgcacgt

SEQ ID NO: 4831 - DNA, 20 bp, Artificial
  20-mer unique DNA sequence
cgacatctcggcaaagcggc

SEQ ID NO: 4832 - DNA, 20 bp, Artificial
  20-mer unique DNA sequence
tagcgttcgagtcccgggtt

SEQ ID NO: 4833 - DNA, 20 bp, Artificial
  20-mer unique DNA sequence
tgctcctccgtgcctgctca

SEQ ID NO: 4834 - DNA, 20 bp, Artificial
  20-mer unique DNA sequence
acccactccgcaccctgtca

SEQ ID NO: 4835 - DNA, 20 bp, Artificial
  20-mer unique DNA sequence
gatgtcctgtctcccgcgcc

SEQ ID NO: 4836 - DNA, 20 bp, Artificial
  20-mer unique DNA sequence
cgttgttccctggtcccgca

SEQ ID NO: 4837 - DNA, 20 bp, Artificial
  20-mer unique DNA sequence
ccgcagccctaacccaatgt

SEQ ID NO: 4838 - DNA, 20 bp, Artificial
  20-mer unique DNA sequence
atgcgccgactactaacccg

SEQ ID NO: 4839 - DNA, 20 bp, Artificial
  20-mer unique DNA sequence
agaccggaaccggacgtaca

SEQ ID NO: 4840 - DNA, 20 bp, Artificial
  20-mer unique DNA sequence
ggtcgtttcgtttcgcggtt

SEQ ID NO: 4841 - DNA, 20 bp, Artificial
  20-mer unique DNA sequence
tccccagcacaagaccgcaa

SEQ ID NO: 4842 - DNA, 20 bp, Artificial
  20-mer unique DNA sequence
tcgtccctgcgcctttatga

SEQ ID NO: 4843 - DNA, 20 bp, Artificial
  20-mer unique DNA sequence
tgcctgcgcgtacgtttttc

SEQ ID NO: 4844 - DNA, 20 bp, Artificial
  20-mer unique DNA sequence
agggggcgcggttgcatata

SEQ ID NO: 4845 - DNA, 20 bp, Artificial
  20-mer unique DNA sequence
ggacgttatagcggcgaggc

SEQ ID NO: 4846 - DNA, 20 bp, Artificial
  20-mer unique DNA sequence
cgcgaccctcacccattcct

SEQ ID NO: 4847 - DNA, 20 bp, Artificial
  20-mer unique DNA sequence
caagtgcatcatcggcccgt

SEQ ID NO: 4848 - DNA, 20 bp, Artificial
  20-mer unique DNA sequence
gaacagacccgccgatccct

SEQ ID NO: 4849 - DNA, 20 bp, Artificial
  20-mer unique DNA sequence
tcctgcaaccctctcgaatt

SEQ ID NO: 4850 - DNA, 20 bp, Artificial
  20-mer unique DNA sequence
gcgaggctcagactaccgaa

SEQ ID NO: 4851 - DNA, 20 bp, Artificial
  20-mer unique DNA sequence
gatttccttccgcggcagct

SEQ ID NO: 4852 - DNA, 20 bp, Artificial
  20-mer unique DNA sequence
tgccctcaccacgcactcaa

SEQ ID NO: 4853 - DNA, 20 bp, Artificial
  20-mer unique DNA sequence
atcggtcaggggttagcggg

SEQ ID NO: 4854 - DNA, 20 bp, Artificial
  20-mer unique DNA sequence
gcgagcgaaggtagtcggga

SEQ ID NO: 4855 - DNA, 20 bp, Artificial
  20-mer unique DNA sequence
cccgcagcgatcagttcccc

SEQ ID NO: 4856 - DNA, 20 bp, Artificial
  20-mer unique DNA sequence
ggcaacaagcagcaaagcgg

SEQ ID NO: 4857 - DNA, 20 bp, Artificial
  20-mer unique DNA sequence
tggtgtatgcatcgggggcc

SEQ ID NO: 4858 - DNA, 20 bp, Artificial
  20-mer unique DNA sequence
ctggcacccccggcttttta

SEQ ID NO: 4859 - DNA, 20 bp, Artificial
  20-mer unique DNA sequence
tgggaacattttgggccacg

SEQ ID NO: 4860 - DNA, 20 bp, Artificial
  20-mer unique DNA sequence
ctgtctagcggcggccatct

SEQ ID NO: 4861 - DNA, 20 bp, Artificial
  20-mer unique DNA sequence
cctaacggggaagggtccgc

SEQ ID NO: 4862 - DNA, 20 bp, Artificial
  20-mer unique DNA sequence
gcggcaaggaggtgtggcta

SEQ ID NO: 4863 - DNA, 20 bp, Artificial
  20-mer unique DNA sequence
ggcacaaagcgaggggaaca

SEQ ID NO: 4864 - DNA, 20 bp, Artificial
  20-mer unique DNA sequence
tccgtcgggctcaaaaacct

SEQ ID NO: 4865 - DNA, 20 bp, Artificial
  20-mer unique DNA sequence
tccgcccgcccatctttctc

SEQ ID NO: 4866 - DNA, 20 bp, Artificial
  20-mer unique DNA sequence
cacttggatcgcccccctgt

SEQ ID NO: 4867 - DNA, 20 bp, Artificial
  20-mer unique DNA sequence
ggcggttgggagaaggcgag

SEQ ID NO: 4868 - DNA, 20 bp, Artificial
  20-mer unique DNA sequence
cctacgcccatttacccccc

SEQ ID NO: 4869 - DNA, 20 bp, Artificial
  20-mer unique DNA sequence
tcgtttctctgcggctcccc

SEQ ID NO: 4870 - DNA, 20 bp, Artificial
  20-mer unique DNA sequence
gagtcccccacaagaagccg

SEQ ID NO: 4871 - DNA, 20 bp, Artificial
  20-mer unique DNA sequence
caaacccccgactccaacgc

SEQ ID NO: 4872 - DNA, 20 bp, Artificial
  20-mer unique DNA sequence
agcagctagcccgcgaaaga

SEQ ID NO: 4873 - DNA, 20 bp, Artificial
  20-mer unique DNA sequence
gggcttaattggcgactgtt

SEQ ID NO: 4874 - DNA, 20 bp, Artificial
  20-mer unique DNA sequence
aagagagggcaccgcgcaaa

SEQ ID NO: 4875 - DNA, 20 bp, Artificial
  20-mer unique DNA sequence
ctggtgagcggaaaagcggc

SEQ ID NO: 4876 - DNA, 20 bp, Artificial
  20-mer unique DNA sequence
gtcttctccgccgcgatttc

SEQ ID NO: 4877 - DNA, 20 bp, Artificial
  20-mer unique DNA sequence
tagcgagcctcaacacgcgg

SEQ ID NO: 4878 - DNA, 20 bp, Artificial
  20-mer unique DNA sequence
gttacagcccccgtgccctc

SEQ ID NO: 4879 - DNA, 20 bp, Artificial
  20-mer unique DNA sequence
caagcaaacctacgcgcgaa

SEQ ID NO: 4880 - DNA, 20 bp, Artificial
  20-mer unique DNA sequence
ctcctagaatgtccgcgcgc

SEQ ID NO: 4881 - DNA, 20 bp, Artificial
  20-mer unique DNA sequence
tcttttcggagggcgtggct

SEQ ID NO: 4882 - DNA, 20 bp, Artificial
  20-mer unique DNA sequence
gtggtcagggcgtgtgggct

SEQ ID NO: 4883 - DNA, 20 bp, Artificial
  20-mer unique DNA sequence
cgctaccacccccgcattta

SEQ ID NO: 4884 - DNA, 20 bp, Artificial
  20-mer unique DNA sequence
ttggcaccctggaagcgacg

SEQ ID NO: 4885 - DNA, 20 bp, Artificial
  20-mer unique DNA sequence
gtgcagaggtgtggtcggga

SEQ ID NO: 4886 - DNA, 20 bp, Artificial
  20-mer unique DNA sequence
ctacacccagccacatgccg

SEQ ID NO: 4887 - DNA, 20 bp, Artificial
  20-mer unique DNA sequence
ggccgctcccaatcatgaat

SEQ ID NO: 4888 - DNA, 20 bp, Artificial
  20-mer unique DNA sequence
gcgaagcaagtcgggggttg

SEQ ID NO: 4889 - DNA, 20 bp, Artificial
  20-mer unique DNA sequence
agcccctaggccaaagtgcg

SEQ ID NO: 4890 - DNA, 20 bp, Artificial
  20-mer unique DNA sequence
catcttccgcgtgcttgtgc

SEQ ID NO: 4891 - DNA, 20 bp, Artificial
  20-mer unique DNA sequence
gactggtaagggagcggccg

SEQ ID NO: 4892 - DNA, 20 bp, Artificial
  20-mer unique DNA sequence
ccttgggctgcggtggctta

SEQ ID NO: 4893 - DNA, 20 bp, Artificial
  20-mer unique DNA sequence
cccatcgtgtgccctagcct

SEQ ID NO: 4894 - DNA, 20 bp, Artificial
  20-mer unique DNA sequence
tcccctgcgctctccaaatt

SEQ ID NO: 4895 - DNA, 20 bp, Artificial
  20-mer unique DNA sequence
gggggccgattgatgaaaaa

SEQ ID NO: 4896 - DNA, 20 bp, Artificial
  20-mer unique DNA sequence
ttgggtgagcggatagggca

SEQ ID NO: 4897 - DNA, 20 bp, Artificial
  20-mer unique DNA sequence
gttggggcggattcggagta

SEQ ID NO: 4898 - DNA, 20 bp, Artificial
  20-mer unique DNA sequence
ttaccccattatccgcccca

SEQ ID NO: 4899 - DNA, 20 bp, Artificial
  20-mer unique DNA sequence
aacttccaacatgcgggggg

SEQ ID NO: 4900 - DNA, 20 bp, Artificial
  20-mer unique DNA sequence
accagggaagggcggaaggt

SEQ ID NO: 4901 - DNA, 20 bp, Artificial
  20-mer unique DNA sequence
caccatatcccccaagtccc

SEQ ID NO: 4902 - DNA, 20 bp, Artificial
  20-mer unique DNA sequence
gtggaaatcggctgggaggc

SEQ ID NO: 4903 - DNA, 20 bp, Artificial
  20-mer unique DNA sequence
agcgcccggtagagcacttt

SEQ ID NO: 4904 - DNA, 20 bp, Artificial
  20-mer unique DNA sequence
gggctccgcgcttcatagtc

SEQ ID NO: 4905 - DNA, 20 bp, Artificial
  20-mer unique DNA sequence
atcgaataatggggcggcac

SEQ ID NO: 4906 - DNA, 20 bp, Artificial
  20-mer unique DNA sequence
tcgcggggccttaagcattt

SEQ ID NO: 4907 - DNA, 20 bp, Artificial
  20-mer unique DNA sequence
gtggtccgcgttcggagtat

SEQ ID NO: 4908 - DNA, 20 bp, Artificial
  20-mer unique DNA sequence
tttcctgggcccgtcctgta

SEQ ID NO: 4909 - DNA, 20 bp, Artificial
  20-mer unique DNA sequence
accatccatctcacgggcca

SEQ ID NO: 4910 - DNA, 20 bp, Artificial
  20-mer unique DNA sequence
agaagccctgcgcgataccc

SEQ ID NO: 4911 - DNA, 20 bp, Artificial
  20-mer unique DNA sequence
tgattttaggcccgggatgg

SEQ ID NO: 4912 - DNA, 20 bp, Artificial
  20-mer unique DNA sequence
acctgggatcgcgttgggta

SEQ ID NO: 4913 - DNA, 20 bp, Artificial
  20-mer unique DNA sequence
gttgcgatcgagttccccgg

SEQ ID NO: 4914 - DNA, 20 bp, Artificial
  20-mer unique DNA sequence
ccgcccaatttaaagctgcc

SEQ ID NO: 4915 - DNA, 20 bp, Artificial
  20-mer unique DNA sequence
tcactttgggcggggcttta

SEQ ID NO: 4916 - DNA, 20 bp, Artificial
  20-mer unique DNA sequence
ttggacggtgggacagtgga

SEQ ID NO: 4917 - DNA, 20 bp, Artificial
  20-mer unique DNA sequence
gcaggagtgtcagaggtcgg

SEQ ID NO: 4918 - DNA, 20 bp, Artificial
  20-mer unique DNA sequence
cctaagcaacatccccccga

SEQ ID NO: 4919 - DNA, 20 bp, Artificial
  20-mer unique DNA sequence
aacgttccccatttcgctcc

SEQ ID NO: 4920 - DNA, 20 bp, Artificial
  20-mer unique DNA sequence
ccaattgagaaccgccagcg

SEQ ID NO: 4921 - DNA, 20 bp, Artificial
  20-mer unique DNA sequence
cacgggggggggagactatc

SEQ ID NO: 4922 - DNA, 20 bp, Artificial
  20-mer unique DNA sequence
tcagctcggccacgttcatt

SEQ ID NO: 4923 - DNA, 20 bp, Artificial
  20-mer unique DNA sequence
ccttgccctgtccatctcgc

SEQ ID NO: 4924 - DNA, 20 bp, Artificial
  20-mer unique DNA sequence
tgcccccgatttaccgattc

SEQ ID NO: 4925 - DNA, 20 bp, Artificial
  20-mer unique DNA sequence
gccgtggagcgttatggagg

SEQ ID NO: 4926 - DNA, 20 bp, Artificial
  20-mer unique DNA sequence
ttaggtcagtgtggccggca

SEQ ID NO: 4927 - DNA, 20 bp, Artificial
  20-mer unique DNA sequence
tgacacacccctttttgccg

SEQ ID NO: 4928 - DNA, 20 bp, Artificial
  20-mer unique DNA sequence
gccaactatgcgtcacaggc

SEQ ID NO: 4929 - DNA, 20 bp, Artificial
  20-mer unique DNA sequence
tggcgagtgccgtgcatatc

SEQ ID NO: 4930 - DNA, 20 bp, Artificial
  20-mer unique DNA sequence
ggggctgcaaaaggacgagg

SEQ ID NO: 4931 - DNA, 20 bp, Artificial
  20-mer unique DNA sequence
cataagggcaccgtggggct

SEQ ID NO: 4932 - DNA, 20 bp, Artificial
  20-mer unique DNA sequence
gcgggtgaggagaggtgggt

SEQ ID NO: 4933 - DNA, 20 bp, Artificial
  20-mer unique DNA sequence
tcgtccgcctcagtcttccg

SEQ ID NO: 4934 - DNA, 20 bp, Artificial
  20-mer unique DNA sequence
ctgcccctagttccggtcga

SEQ ID NO: 4935 - DNA, 20 bp, Artificial
  20-mer unique DNA sequence
tgttcccatctcgcgctcgt

SEQ ID NO: 4936 - DNA, 20 bp, Artificial
  20-mer unique DNA sequence
cgccaccccgtcgttctctg

SEQ ID NO: 4937 - DNA, 20 bp, Artificial
  20-mer unique DNA sequence
tgtttaccgttcccccagcc

SEQ ID NO: 4938 - DNA, 20 bp, Artificial
  20-mer unique DNA sequence
attttggggctggctcgggt

SEQ ID NO: 4939 - DNA, 20 bp, Artificial
  20-mer unique DNA sequence
gggtggttcgggactggtgt

SEQ ID NO: 4940 - DNA, 20 bp, Artificial
  20-mer unique DNA sequence
atggattccgcctctgtcgc

SEQ ID NO: 4941 - DNA, 20 bp, Artificial
  20-mer unique DNA sequence
gccagaaaggggcgtacaag

SEQ ID NO: 4942 - DNA, 20 bp, Artificial
  20-mer unique DNA sequence
cacctcggccgctttccata

SEQ ID NO: 4943 - DNA, 20 bp, Artificial
  20-mer unique DNA sequence
ttcgggttggggacagttgc

SEQ ID NO: 4944 - DNA, 20 bp, Artificial
  20-mer unique DNA sequence
accgacgctttgcccgattt

SEQ ID NO: 4945 - DNA, 20 bp, Artificial
  20-mer unique DNA sequence
actcgaaaggccgccggata

SEQ ID NO: 4946 - DNA, 20 bp, Artificial
  20-mer unique DNA sequence
aaatgatgcccccaaccccc

SEQ ID NO: 4947 - DNA, 20 bp, Artificial
  20-mer unique DNA sequence
cccgtcttcgtccatccacc

SEQ ID NO: 4948 - DNA, 20 bp, Artificial
  20-mer unique DNA sequence
tttgagctaccggttcggca

SEQ ID NO: 4949 - DNA, 20 bp, Artificial
  20-mer unique DNA sequence
ccgagtcgcgaacctcacat

SEQ ID NO: 4950 - DNA, 20 bp, Artificial
  20-mer unique DNA sequence
gcgccacgacaaggggacag

SEQ ID NO: 4951 - DNA, 20 bp, Artificial
  20-mer unique DNA sequence
ccaattggccgctgctaccc

SEQ ID NO: 4952 - DNA, 20 bp, Artificial
  20-mer unique DNA sequence
ggaaccgggacataggcaca

SEQ ID NO: 4953 - DNA, 20 bp, Artificial
  20-mer unique DNA sequence
ggctgtcggtcggggctaca

SEQ ID NO: 4954 - DNA, 20 bp, Artificial
  20-mer unique DNA sequence
tgattatgtcgcagggggcc

SEQ ID NO: 4955 - DNA, 20 bp, Artificial
  20-mer unique DNA sequence
agtgtttctggcggacggga

SEQ ID NO: 4956 - DNA, 20 bp, Artificial
  20-mer unique DNA sequence
gtgtccgcgccgtctccatt

SEQ ID NO: 4957 - DNA, 20 bp, Artificial
  20-mer unique DNA sequence
ccgggggcaattggagggta

SEQ ID NO: 4958 - DNA, 20 bp, Artificial
  20-mer unique DNA sequence
caggcgcgcaagagcagatt

SEQ ID NO: 4959 - DNA, 20 bp, Artificial
  20-mer unique DNA sequence
gtcatcacgggccacagggg

SEQ ID NO: 4960 - DNA, 20 bp, Artificial
  20-mer unique DNA sequence
tcgggagcgggtaaagggtg

SEQ ID NO: 4961 - DNA, 20 bp, Artificial
  20-mer unique DNA sequence
tacaaatggggggacgcgac

SEQ ID NO: 4962 - DNA, 20 bp, Artificial
  20-mer unique DNA sequence
gcgaagtagcggaggggacc

SEQ ID NO: 4963 - DNA, 20 bp, Artificial
  20-mer unique DNA sequence
gcctgtctcgggtctgctcg

SEQ ID NO: 4964 - DNA, 20 bp, Artificial
  20-mer unique DNA sequence
ttccgagaagtccgtgacgc

SEQ ID NO: 4965 - DNA, 20 bp, Artificial
  20-mer unique DNA sequence
actgtcgtggtcaggagcgt

SEQ ID NO: 4966 - DNA, 20 bp, Artificial
  20-mer unique DNA sequence
cgcatacgtcccccaacagg

SEQ ID NO: 4967 - DNA, 20 bp, Artificial
  20-mer unique DNA sequence
acccaccccatcgttcaccg

SEQ ID NO: 4968 - DNA, 20 bp, Artificial
  20-mer unique DNA sequence
actaagggcgggggagaacg

SEQ ID NO: 4969 - DNA, 20 bp, Artificial
  20-mer unique DNA sequence
tgagcgcagggtgaatccaa

SEQ ID NO: 4970 - DNA, 20 bp, Artificial
  20-mer unique DNA sequence
caccgacccacattcccccc

SEQ ID NO: 4971 - DNA, 20 bp, Artificial
  20-mer unique DNA sequence
tgaacagtgggcagacgcgt

SEQ ID NO: 4972 - DNA, 20 bp, Artificial
  20-mer unique DNA sequence
ttcacccttcccgactccgt

SEQ ID NO: 4973 - DNA, 20 bp, Artificial
  20-mer unique DNA sequence
tccggggcgcctaatccata

SEQ ID NO: 4974 - DNA, 20 bp, Artificial
  20-mer unique DNA sequence
agtggcaagatgagcggccg

SEQ ID NO: 4975 - DNA, 20 bp, Artificial
  20-mer unique DNA sequence
gcggcgcgacgtattaatga

SEQ ID NO: 4976 - DNA, 20 bp, Artificial
  20-mer unique DNA sequence
agaggaggggaaaagcaccg

SEQ ID NO: 4977 - DNA, 20 bp, Artificial
  20-mer unique DNA sequence
ccatcctgttcgcgcccata

SEQ ID NO: 4978 - DNA, 20 bp, Artificial
  20-mer unique DNA sequence
cggcccccctataaacgtcg

SEQ ID NO: 4979 - DNA, 20 bp, Artificial
  20-mer unique DNA sequence
ccgcctattgtcgcccttgt

SEQ ID NO: 4980 - DNA, 20 bp, Artificial
  20-mer unique DNA sequence
ctcccacacttgccgctacg

SEQ ID NO: 4981 - DNA, 20 bp, Artificial
  20-mer unique DNA sequence
gggactgggctacgaacgga

SEQ ID NO: 4982 - DNA, 20 bp, Artificial
  20-mer unique DNA sequence
gagggagagtaggggcggca

SEQ ID NO: 4983 - DNA, 20 bp, Artificial
  20-mer unique DNA sequence
aacacgctcccccaatccac

SEQ ID NO: 4984 - DNA, 20 bp, Artificial
  20-mer unique DNA sequence
agcggcctatcggctgtgtc

SEQ ID NO: 4985 - DNA, 20 bp, Artificial
  20-mer unique DNA sequence
gccgattggcaggagcgcta

SEQ ID NO: 4986 - DNA, 20 bp, Artificial
  20-mer unique DNA sequence
gaccctcatggaagaccgcc

SEQ ID NO: 4987 - DNA, 20 bp, Artificial
  20-mer unique DNA sequence
ttggccgaaaacagaaccgc

SEQ ID NO: 4988 - DNA, 20 bp, Artificial
  20-mer unique DNA sequence
aggacacgcgatgccaggtt

SEQ ID NO: 4989 - DNA, 20 bp, Artificial
  20-mer unique DNA sequence
cctagtgggcactgcagcaa

SEQ ID NO: 4990 - DNA, 20 bp, Artificial
  20-mer unique DNA sequence
caaggaaaagaccggccatc

SEQ ID NO: 4991 - DNA, 20 bp, Artificial
  20-mer unique DNA sequence
gtcacctacaaccgcgcacg

SEQ ID NO: 4992 - DNA, 20 bp, Artificial
  20-mer unique DNA sequence
gccgccaccacaggaacaag

SEQ ID NO: 4993 - DNA, 20 bp, Artificial
  20-mer unique DNA sequence
ttacctccagccacgtgccg

SEQ ID NO: 4994 - DNA, 20 bp, Artificial
  20-mer unique DNA sequence
tcaccaccgcccatcgagaa

SEQ ID NO: 4995 - DNA, 20 bp, Artificial
  20-mer unique DNA sequence
tgcctaggggtccaatgccg

SEQ ID NO: 4996 - DNA, 20 bp, Artificial
  20-mer unique DNA sequence
agcggggattttggcatgca

SEQ ID NO: 4997 - DNA, 20 bp, Artificial
  20-mer unique DNA sequence
ggccggcacccttaccaaca

SEQ ID NO: 4998 - DNA, 20 bp, Artificial
  20-mer unique DNA sequence
aacccgtccaagccatcatg

SEQ ID NO: 4999 - DNA, 20 bp, Artificial
  20-mer unique DNA sequence
caggacagagctcgaggggg

SEQ ID NO: 5000 - DNA, 20 bp, Artificial
  20-mer unique DNA sequence
tcggggattttggcggtcac

SEQ ID NO: 5001 - DNA, 20 bp, Artificial
  20-mer unique DNA sequence
aagtgggtcatcggggcaac

SEQ ID NO: 5002 - DNA, 20 bp, Artificial
  20-mer unique DNA sequence
atgttgatgtgcggacgggg

SEQ ID NO: 5003 - DNA, 20 bp, Artificial
  20-mer unique DNA sequence
acgagccccgcaaacaactg

SEQ ID NO: 5004 - DNA, 20 bp, Artificial
  20-mer unique DNA sequence
tcggtttcggggcgtcttat

SEQ ID NO: 5005 - DNA, 20 bp, Artificial
  20-mer unique DNA sequence
ggcaaaagcaaggggcgttc

SEQ ID NO: 5006 - DNA, 20 bp, Artificial
  20-mer unique DNA sequence
cgggggtggccatagcaaaa

SEQ ID NO: 5007 - DNA, 20 bp, Artificial
  20-mer unique DNA sequence
tgccggcttcgctccctgta

SEQ ID NO: 5008 - DNA, 20 bp, Artificial
  20-mer unique DNA sequence
ccggtggtgctcgtctgggt

SEQ ID NO: 5009 - DNA, 20 bp, Artificial
  20-mer unique DNA sequence
gtggttgggcggctgtggag

SEQ ID NO: 5010 - DNA, 20 bp, Artificial
  20-mer unique DNA sequence
tctttgtcgggaccgcactg

SEQ ID NO: 5011 - DNA, 20 bp, Artificial
  20-mer unique DNA sequence
atcctcccggccggttacat

SEQ ID NO: 5012 - DNA, 20 bp, Artificial
  20-mer unique DNA sequence
catcgcaaggccgtcaaaag

SEQ ID NO: 5013 - DNA, 20 bp, Artificial
  20-mer unique DNA sequence
agctgcgatcgggaccttcc

SEQ ID NO: 5014 - DNA, 20 bp, Artificial
  20-mer unique DNA sequence
atatgcttcgcgacgcggtc

SEQ ID NO: 5015 - DNA, 20 bp, Artificial
  20-mer unique DNA sequence
tctcagcgtgtgctgacgga

SEQ ID NO: 5016 - DNA, 20 bp, Artificial
  20-mer unique DNA sequence
tcatcttgccatcgctttgc

SEQ ID NO: 5017 - DNA, 20 bp, Artificial
  20-mer unique DNA sequence
cgtcccgcccagtcaaaaca

SEQ ID NO: 5018 - DNA, 20 bp, Artificial
  20-mer unique DNA sequence
accatgacctgagcgagctg

SEQ ID NO: 5019 - DNA, 20 bp, Artificial
  20-mer unique DNA sequence
ctgtcgtcgtcccaagtgtg

SEQ ID NO: 5020 - DNA, 20 bp, Artificial
  20-mer unique DNA sequence
ccgtccgttggtctttgcgt

SEQ ID NO: 5021 - DNA, 20 bp, Artificial
  20-mer unique DNA sequence
gggggctgagttgcgatttg

SEQ ID NO: 5022 - DNA, 20 bp, Artificial
  20-mer unique DNA sequence
tcagaaacaacgcgcgggac

SEQ ID NO: 5023 - DNA, 20 bp, Artificial
  20-mer unique DNA sequence
tcaacaaaagccgcgatccg

SEQ ID NO: 5024 - DNA, 20 bp, Artificial
  20-mer unique DNA sequence
caagccagcccgcgtacgac

SEQ ID NO: 5025 - DNA, 20 bp, Artificial
  20-mer unique DNA sequence
aacagcacaccaccgcgcag

SEQ ID NO: 5026 - DNA, 20 bp, Artificial
  20-mer unique DNA sequence
gacaggctcggcactacctt

SEQ ID NO: 5027 - DNA, 20 bp, Artificial
  20-mer unique DNA sequence
gtcgcaaacaccaccccctt

SEQ ID NO: 5028 - DNA, 20 bp, Artificial
  20-mer unique DNA sequence
cacgccgacccatgctactg

SEQ ID NO: 5029 - DNA, 20 bp, Artificial
  20-mer unique DNA sequence
gattggatgcgggtacggga

SEQ ID NO: 5030 - DNA, 20 bp, Artificial
  20-mer unique DNA sequence
aatatcgcgcgcaccaacca

SEQ ID NO: 5031 - DNA, 20 bp, Artificial
  20-mer unique DNA sequence
agacgcggcccacatagcaa

SEQ ID NO: 5032 - DNA, 20 bp, Artificial
  20-mer unique DNA sequence
gcggcattcggttttaggcg

SEQ ID NO: 5033 - DNA, 20 bp, Artificial
  20-mer unique DNA sequence
tgctttggaccccgtatggc

SEQ ID NO: 5034 - DNA, 20 bp, Artificial
  20-mer unique DNA sequence
gggaggttgacggtgggcat

SEQ ID NO: 5035 - DNA, 20 bp, Artificial
  20-mer unique DNA sequence
acccaatcgcgaacggctag

SEQ ID NO: 5036 - DNA, 20 bp, Artificial
  20-mer unique DNA sequence
tcggccgcaaagtacccaaa

SEQ ID NO: 5037 - DNA, 20 bp, Artificial
  20-mer unique DNA sequence
ttcccggtcacctgcagtca

SEQ ID NO: 5038 - DNA, 20 bp, Artificial
  20-mer unique DNA sequence
tggggctcgtgtccgtttct

SEQ ID NO: 5039 - DNA, 20 bp, Artificial
  20-mer unique DNA sequence
ccacacccaacgctacgcaa

SEQ ID NO: 5040 - DNA, 20 bp, Artificial
  20-mer unique DNA sequence
ccatgttgaggggtcgaggt

SEQ ID NO: 5041 - DNA, 20 bp, Artificial
  20-mer unique DNA sequence
ttgagggttaagcggaggcg

SEQ ID NO: 5042 - DNA, 20 bp, Artificial
  20-mer unique DNA sequence
acctgttcctcgtgcgccct

SEQ ID NO: 5043 - DNA, 20 bp, Artificial
  20-mer unique DNA sequence
gcgagccaaatcatgacggg

SEQ ID NO: 5044 - DNA, 20 bp, Artificial
  20-mer unique DNA sequence
ccccagagcgtgatgcaaca

SEQ ID NO: 5045 - DNA, 20 bp, Artificial
  20-mer unique DNA sequence
actttgggtctggggtgcac

SEQ ID NO: 5046 - DNA, 20 bp, Artificial
  20-mer unique DNA sequence
ggcgggatggttaggggcac

SEQ ID NO: 5047 - DNA, 20 bp, Artificial
  20-mer unique DNA sequence
cgaacctcgctcccgcttcc

SEQ ID NO: 5048 - DNA, 20 bp, Artificial
  20-mer unique DNA sequence
agaatccacggctccccaca

SEQ ID NO: 5049 - DNA, 20 bp, Artificial
  20-mer unique DNA sequence
cctcagactcccgcttgcca

SEQ ID NO: 5050 - DNA, 20 bp, Artificial
  20-mer unique DNA sequence
cagacacgcttccggcagcc

SEQ ID NO: 5051 - DNA, 20 bp, Artificial
  20-mer unique DNA sequence
ctcgacgccgcctcttacgg

SEQ ID NO: 5052 - DNA, 20 bp, Artificial
  20-mer unique DNA sequence
ggggggcgatgaaatggtgt

SEQ ID NO: 5053 - DNA, 20 bp, Artificial
  20-mer unique DNA sequence
agcagcaaacgcacccaaga

SEQ ID NO: 5054 - DNA, 20 bp, Artificial
  20-mer unique DNA sequence
cattccccccgtcagtccat

SEQ ID NO: 5055 - DNA, 20 bp, Artificial
  20-mer unique DNA sequence
tctcttcagtttggcccgca

SEQ ID NO: 5056 - DNA, 20 bp, Artificial
  20-mer unique DNA sequence
actgccgacgagccgataca

SEQ ID NO: 5057 - DNA, 20 bp, Artificial
  20-mer unique DNA sequence
gcggtacccggatttccgtt

SEQ ID NO: 5058 - DNA, 20 bp, Artificial
  20-mer unique DNA sequence
ttgagaggcgcacgggagta

SEQ ID NO: 5059 - DNA, 20 bp, Artificial
  20-mer unique DNA sequence
cttaacgattggaccgcgcg

SEQ ID NO: 5060 - DNA, 20 bp, Artificial
  20-mer unique DNA sequence
tgggggtgagagttgggcga

SEQ ID NO: 5061 - DNA, 20 bp, Artificial
  20-mer unique DNA sequence
ccgcctgccctttgtttcac

SEQ ID NO: 5062 - DNA, 20 bp, Artificial
  20-mer unique DNA sequence
aattcccaccccatccaacg

SEQ ID NO: 5063 - DNA, 20 bp, Artificial
  20-mer unique DNA sequence
gctccctccaacgtccgaac

SEQ ID NO: 5064 - DNA, 20 bp, Artificial
  20-mer unique DNA sequence
ggggggtaggaattgccggg

SEQ ID NO: 5065 - DNA, 20 bp, Artificial
  20-mer unique DNA sequence
cgaagaagatgaccccccgc

SEQ ID NO: 5066 - DNA, 20 bp, Artificial
  20-mer unique DNA sequence
acccgccgaacgctaccctc

SEQ ID NO: 5067 - DNA, 20 bp, Artificial
  20-mer unique DNA sequence
ccccccgcaaattccatacg

SEQ ID NO: 5068 - DNA, 20 bp, Artificial
  20-mer unique DNA sequence
ccccggagaacactgcatca

SEQ ID NO: 5069 - DNA, 20 bp, Artificial
  20-mer unique DNA sequence
ggggccggtgacctagctcg

SEQ ID NO: 5070 - DNA, 20 bp, Artificial
  20-mer unique DNA sequence
gcttgatccggcccacgtta

SEQ ID NO: 5071 - DNA, 20 bp, Artificial
  20-mer unique DNA sequence
gaagcgttgtccggggtctg

SEQ ID NO: 5072 - DNA, 20 bp, Artificial
  20-mer unique DNA sequence
acccctgcccaagtcaaacg

SEQ ID NO: 5073 - DNA, 20 bp, Artificial
  20-mer unique DNA sequence
gtgattcgtcgccgtgcttc

SEQ ID NO: 5074 - DNA, 20 bp, Artificial
  20-mer unique DNA sequence
ttatgtcgggtgggcgaggc

SEQ ID NO: 5075 - DNA, 20 bp, Artificial
  20-mer unique DNA sequence
atggctggggttacgatggg

SEQ ID NO: 5076 - DNA, 20 bp, Artificial
  20-mer unique DNA sequence
aatccacagccccgatgagc

SEQ ID NO: 5077 - DNA, 20 bp, Artificial
  20-mer unique DNA sequence
tggccgatagaaagtcccgc

SEQ ID NO: 5078 - DNA, 20 bp, Artificial
  20-mer unique DNA sequence
gtcgacatgaccgggtgcct

SEQ ID NO: 5079 - DNA, 20 bp, Artificial
  20-mer unique DNA sequence
aatcgtcaaatggtcccggc

SEQ ID NO: 5080 - DNA, 20 bp, Artificial
  20-mer unique DNA sequence
atgatcccggcctttccgac

SEQ ID NO: 5081 - DNA, 20 bp, Artificial
  20-mer unique DNA sequence
tgctcggggtgcgtatcagg

SEQ ID NO: 5082 - DNA, 20 bp, Artificial
  20-mer unique DNA sequence
tagccccattcccaccccga

SEQ ID NO: 5083 - DNA, 20 bp, Artificial
  20-mer unique DNA sequence
tccacatacacctgcggctc

SEQ ID NO: 5084 - DNA, 20 bp, Artificial
  20-mer unique DNA sequence
ctcttgcgttggtcccctgg

SEQ ID NO: 5085 - DNA, 20 bp, Artificial
  20-mer unique DNA sequence
aagcgcggcaaactagggac

SEQ ID NO: 5086 - DNA, 20 bp, Artificial
  20-mer unique DNA sequence
gacccggacgctcaaccatg

SEQ ID NO: 5087 - DNA, 20 bp, Artificial
  20-mer unique DNA sequence
ttgaattcgcgtggtggggc

SEQ ID NO: 5088 - DNA, 20 bp, Artificial
  20-mer unique DNA sequence
gttgcaaatgggccgctgag

SEQ ID NO: 5089 - DNA, 20 bp, Artificial
  20-mer unique DNA sequence
gaccaaggcctcggggaaag

SEQ ID NO: 5090 - DNA, 20 bp, Artificial
  20-mer unique DNA sequence
ctaaccccccgactcaccca

SEQ ID NO: 5091 - DNA, 20 bp, Artificial
  20-mer unique DNA sequence
ctcccaaaagccccaggtcg

SEQ ID NO: 5092 - DNA, 20 bp, Artificial
  20-mer unique DNA sequence
accagcgctccccctttttg

SEQ ID NO: 5093 - DNA, 20 bp, Artificial
  20-mer unique DNA sequence
gtgtgtactggatgcgccgg

SEQ ID NO: 5094 - DNA, 20 bp, Artificial
  20-mer unique DNA sequence
gggggacgaacaagggccaa

SEQ ID NO: 5095 - DNA, 20 bp, Artificial
  20-mer unique DNA sequence
caacaaggcggaggcagcaa

SEQ ID NO: 5096 - DNA, 20 bp, Artificial
  20-mer unique DNA sequence
ttccaagccaatcgatccgg

SEQ ID NO: 5097 - DNA, 20 bp, Artificial
  20-mer unique DNA sequence
gtagtggcgggggagggtgc

SEQ ID NO: 5098 - DNA, 20 bp, Artificial
  20-mer unique DNA sequence
cagcaccccaccgtttaggc

SEQ ID NO: 5099 - DNA, 20 bp, Artificial
  20-mer unique DNA sequence
ttggtgatgaaacggcgcga

SEQ ID NO: 5100 - DNA, 20 bp, Artificial
  20-mer unique DNA sequence
gaagggggggccaatcaggt

SEQ ID NO: 5101 - DNA, 20 bp, Artificial
  20-mer unique DNA sequence
gcgcgaatggggtcgtaatg

SEQ ID NO: 5102 - DNA, 20 bp, Artificial
  20-mer unique DNA sequence
tcgtctgcttttaccccgcc

SEQ ID NO: 5103 - DNA, 20 bp, Artificial
  20-mer unique DNA sequence
gcatgggcaacacccgtacg

SEQ ID NO: 5104 - DNA, 20 bp, Artificial
  20-mer unique DNA sequence
aaagcattcagcagcgggcg

SEQ ID NO: 5105 - DNA, 20 bp, Artificial
  20-mer unique DNA sequence
ccctgtcccctgtttctgcg

SEQ ID NO: 5106 - DNA, 20 bp, Artificial
  20-mer unique DNA sequence
gtccgggcctgtttttgggt

SEQ ID NO: 5107 - DNA, 20 bp, Artificial
  20-mer unique DNA sequence
ctatttttggcaccggcgcc

SEQ ID NO: 5108 - DNA, 20 bp, Artificial
  20-mer unique DNA sequence
accttcgcgggcgttttctt

SEQ ID NO: 5109 - DNA, 20 bp, Artificial
  20-mer unique DNA sequence
ttgccgcgccctaaaatgca

SEQ ID NO: 5110 - DNA, 20 bp, Artificial
  20-mer unique DNA sequence
ctcactccagccgcaatcgc

SEQ ID NO: 5111 - DNA, 20 bp, Artificial
  20-mer unique DNA sequence
tcgggcgcatttggaacaga

SEQ ID NO: 5112 - DNA, 20 bp, Artificial
  20-mer unique DNA sequence
ggcataccccctccgcctag

SEQ ID NO: 5113 - DNA, 20 bp, Artificial
  20-mer unique DNA sequence
tcgatggtcggctgaggtgg

SEQ ID NO: 5114 - DNA, 20 bp, Artificial
  20-mer unique DNA sequence
cccattcgaaaaacagcccg

SEQ ID NO: 5115 - DNA, 20 bp, Artificial
  20-mer unique DNA sequence
cgtccgccataaagccacaa

SEQ ID NO: 5116 - DNA, 20 bp, Artificial
  20-mer unique DNA sequence
tacgcggccacgtgcgtaaa

SEQ ID NO: 5117 - DNA, 20 bp, Artificial
  20-mer unique DNA sequence
aacatgtacgggccgtggct

SEQ ID NO: 5118 - DNA, 20 bp, Artificial
  20-mer unique DNA sequence
acatcccgcctacgtttgcg

SEQ ID NO: 5119 - DNA, 20 bp, Artificial
  20-mer unique DNA sequence
gtcggcgattggcggatttt

SEQ ID NO: 5120 - DNA, 20 bp, Artificial
  20-mer unique DNA sequence
tgcgtggggaggcctgtact

SEQ ID NO: 5121 - DNA, 20 bp, Artificial
  20-mer unique DNA sequence
ggacaccacggcactcgagc

SEQ ID NO: 5122 - DNA, 20 bp, Artificial
  20-mer unique DNA sequence
cagcccacatatcgcggaaa

SEQ ID NO: 5123 - DNA, 20 bp, Artificial
  20-mer unique DNA sequence
gcataagccgacaatcccca

SEQ ID NO: 5124 - DNA, 20 bp, Artificial
  20-mer unique DNA sequence
cccgccgcaaatcaaagact

SEQ ID NO: 5125 - DNA, 20 bp, Artificial
  20-mer unique DNA sequence
accaaaaccgcaacgcaacg

SEQ ID NO: 5126 - DNA, 20 bp, Artificial
  20-mer unique DNA sequence
tcccgccttagggttgccac

SEQ ID NO: 5127 - DNA, 20 bp, Artificial
  20-mer unique DNA sequence
cttgaccgacgctccgccta

SEQ ID NO: 5128 - DNA, 20 bp, Artificial
  20-mer unique DNA sequence
catgtcggcgcaacttggaa

SEQ ID NO: 5129 - DNA, 20 bp, Artificial
  20-mer unique DNA sequence
aaaacatgtcgcactcgccg

SEQ ID NO: 5130 - DNA, 20 bp, Artificial
  20-mer unique DNA sequence
ttatgacggcggaagggcag

SEQ ID NO: 5131 - DNA, 20 bp, Artificial
  20-mer unique DNA sequence
cgccaccaccgacacaaatg

SEQ ID NO: 5132 - DNA, 20 bp, Artificial
  20-mer unique DNA sequence
caggacgggccaaagaaggg

SEQ ID NO: 5133 - DNA, 20 bp, Artificial
  20-mer unique DNA sequence
caaaatctctatgcgccgcg

SEQ ID NO: 5134 - DNA, 20 bp, Artificial
  20-mer unique DNA sequence
agagcccctacccccgctac

SEQ ID NO: 5135 - DNA, 20 bp, Artificial
  20-mer unique DNA sequence
gcgtgagggatgtggtcgga

SEQ ID NO: 5136 - DNA, 20 bp, Artificial
  20-mer unique DNA sequence
ttggtgtgcgccggaattga

SEQ ID NO: 5137 - DNA, 20 bp, Artificial
  20-mer unique DNA sequence
aaaaggcttgtcaggggtgc

SEQ ID NO: 5138 - DNA, 20 bp, Artificial
  20-mer unique DNA sequence
ggagggtgccgtggtggttc

SEQ ID NO: 5139 - DNA, 20 bp, Artificial
  20-mer unique DNA sequence
ctggagtcgacgtgccatga

SEQ ID NO: 5140 - DNA, 20 bp, Artificial
  20-mer unique DNA sequence
ccctgcgtctctccccctgc

SEQ ID NO: 5141 - DNA, 20 bp, Artificial
  20-mer unique DNA sequence
tcgaatcccaaacccgctgt

SEQ ID NO: 5142 - DNA, 20 bp, Artificial
  20-mer unique DNA sequence
actcgcctgagtgcgctaac

SEQ ID NO: 5143 - DNA, 20 bp, Artificial
  20-mer unique DNA sequence
ttcaattgtgtggcccctgc

SEQ ID NO: 5144 - DNA, 20 bp, Artificial
  20-mer unique DNA sequence
ttttgacgggggggcttttg

SEQ ID NO: 5145 - DNA, 20 bp, Artificial
  20-mer unique DNA sequence
tcggtcatctggctggaggg

SEQ ID NO: 5146 - DNA, 20 bp, Artificial
  20-mer unique DNA sequence
cggcgctgggtgtacgatgg

SEQ ID NO: 5147 - DNA, 20 bp, Artificial
  20-mer unique DNA sequence
tggagaagagggcgcgaaga

SEQ ID NO: 5148 - DNA, 20 bp, Artificial
  20-mer unique DNA sequence
ggtaggcgaggatggaggtt

SEQ ID NO: 5149 - DNA, 20 bp, Artificial
  20-mer unique DNA sequence
atgtccccccgtcccaaaaa

SEQ ID NO: 5150 - DNA, 20 bp, Artificial
  20-mer unique DNA sequence
ctcatcacgccctccgccta

SEQ ID NO: 5151 - DNA, 20 bp, Artificial
  20-mer unique DNA sequence
tcttccttgccgccctgctt

SEQ ID NO: 5152 - DNA, 20 bp, Artificial
  20-mer unique DNA sequence
tagtgcaaaaaatcgcggcg

SEQ ID NO: 5153 - DNA, 20 bp, Artificial
  20-mer unique DNA sequence
aatcgtcacagcgtgggcaa

SEQ ID NO: 5154 - DNA, 20 bp, Artificial
  20-mer unique DNA sequence
gcgttcttaggccccggtgt

SEQ ID NO: 5155 - DNA, 20 bp, Artificial
  20-mer unique DNA sequence
tcgatttttcccggcccatg

SEQ ID NO: 5156 - DNA, 20 bp, Artificial
  20-mer unique DNA sequence
accgcaccagcattcacaca

SEQ ID NO: 5157 - DNA, 20 bp, Artificial
  20-mer unique DNA sequence
gcctcggtcgaacatgccaa

SEQ ID NO: 5158 - DNA, 20 bp, Artificial
  20-mer unique DNA sequence
attgcgggaggggaggctta

SEQ ID NO: 5159 - DNA, 20 bp, Artificial
  20-mer unique DNA sequence
tcgtcccgctcaaatgccac

SEQ ID NO: 5160 - DNA, 20 bp, Artificial
  20-mer unique DNA sequence
tcgcggactatagcgctcgt

SEQ ID NO: 5161 - DNA, 20 bp, Artificial
  20-mer unique DNA sequence
atcggcccggatagcgtaac

SEQ ID NO: 5162 - DNA, 20 bp, Artificial
  20-mer unique DNA sequence
acggacgtcacgttaggcat

SEQ ID NO: 5163 - DNA, 20 bp, Artificial
  20-mer unique DNA sequence
caacgtctcacgctgcatgg

SEQ ID NO: 5164 - DNA, 20 bp, Artificial
  20-mer unique DNA sequence
gcgagctgggacggttggtt

SEQ ID NO: 5165 - DNA, 20 bp, Artificial
  20-mer unique DNA sequence
acgcaagagaacgggacgcc

SEQ ID NO: 5166 - DNA, 20 bp, Artificial
  20-mer unique DNA sequence
ggctttgaggtgctttggcg

SEQ ID NO: 5167 - DNA, 20 bp, Artificial
  20-mer unique DNA sequence
tggctttacgacggctggag

SEQ ID NO: 5168 - DNA, 20 bp, Artificial
  20-mer unique DNA sequence
tgtgacgcaaaatccggacg

SEQ ID NO: 5169 - DNA, 20 bp, Artificial
  20-mer unique DNA sequence
agggggtgtggggctgtcat

SEQ ID NO: 5170 - DNA, 20 bp, Artificial
  20-mer unique DNA sequence
tgccctgattacccaacccg

SEQ ID NO: 5171 - DNA, 20 bp, Artificial
  20-mer unique DNA sequence
cccgctgtccgttttcttgg

SEQ ID NO: 5172 - DNA, 20 bp, Artificial
  20-mer unique DNA sequence
ccgggggcaaggagaccaac

SEQ ID NO: 5173 - DNA, 20 bp, Artificial
  20-mer unique DNA sequence
aagaaccctgcaaagcccgc

SEQ ID NO: 5174 - DNA, 20 bp, Artificial
  20-mer unique DNA sequence
cggtgtcataatcggggcgt

SEQ ID NO: 5175 - DNA, 20 bp, Artificial
  20-mer unique DNA sequence
tccactgtaccgcgtccccg

SEQ ID NO: 5176 - DNA, 20 bp, Artificial
  20-mer unique DNA sequence
ggtcggccgtgattgaggtg

SEQ ID NO: 5177 - DNA, 20 bp, Artificial
  20-mer unique DNA sequence
ggcctcttcccccttgttgc

SEQ ID NO: 5178 - DNA, 20 bp, Artificial
  20-mer unique DNA sequence
acgagtagggcgccagcaat

SEQ ID NO: 5179 - DNA, 20 bp, Artificial
  20-mer unique DNA sequence
gacgtgtatgggcgagccga

SEQ ID NO: 5180 - DNA, 20 bp, Artificial
  20-mer unique DNA sequence
ttctcccattgctgtgcccc

SEQ ID NO: 5181 - DNA, 20 bp, Artificial
  20-mer unique DNA sequence
tctgggcggagatgcaattg

SEQ ID NO: 5182 - DNA, 20 bp, Artificial
  20-mer unique DNA sequence
tgaggacgggcaggagcgag

SEQ ID NO: 5183 - DNA, 20 bp, Artificial
  20-mer unique DNA sequence
gggccgggtatactgggtca

SEQ ID NO: 5184 - DNA, 20 bp, Artificial
  20-mer unique DNA sequence
cacgacgcagccaaagaacc

SEQ ID NO: 5185 - DNA, 20 bp, Artificial
  20-mer unique DNA sequence
tccgagggcgaattccgtac

SEQ ID NO: 5186 - DNA, 20 bp, Artificial
  20-mer unique DNA sequence
ggaagtgggccgtcagcaac

SEQ ID NO: 5187 - DNA, 20 bp, Artificial
  20-mer unique DNA sequence
cgccgaaagccacgtatgcc

SEQ ID NO: 5188 - DNA, 20 bp, Artificial
  20-mer unique DNA sequence
agggcgatgtcctgcggttc

SEQ ID NO: 5189 - DNA, 20 bp, Artificial
  20-mer unique DNA sequence
tgctggccgggttgtaggtg

SEQ ID NO: 5190 - DNA, 20 bp, Artificial
  20-mer unique DNA sequence
acttccggctacaccaggga

SEQ ID NO: 5191 - DNA, 20 bp, Artificial
  20-mer unique DNA sequence
ttcctcggtcactcggcaca

SEQ ID NO: 5192 - DNA, 20 bp, Artificial
  20-mer unique DNA sequence
gaaggcccgggagatgcata

SEQ ID NO: 5193 - DNA, 20 bp, Artificial
  20-mer unique DNA sequence
tcttttccggtcgtcaggcg

SEQ ID NO: 5194 - DNA, 20 bp, Artificial
  20-mer unique DNA sequence
tgccaatcccttccccagcg

SEQ ID NO: 5195 - DNA, 20 bp, Artificial
  20-mer unique DNA sequence
tgctggtaatcgaaacgcgg

SEQ ID NO: 5196 - DNA, 20 bp, Artificial
  20-mer unique DNA sequence
gaatcggctaaacggtcggg

SEQ ID NO: 5197 - DNA, 20 bp, Artificial
  20-mer unique DNA sequence
tcgctacccaccctttgcca

SEQ ID NO: 5198 - DNA, 20 bp, Artificial
  20-mer unique DNA sequence
gttgcggcgttgcgtagttc

SEQ ID NO: 5199 - DNA, 20 bp, Artificial
  20-mer unique DNA sequence
ttgaaaactccgcccatccc

SEQ ID NO: 5200 - DNA, 20 bp, Artificial
  20-mer unique DNA sequence
cccgagcgcgcctatgatga

SEQ ID NO: 5201 - DNA, 20 bp, Artificial
  20-mer unique DNA sequence
acttggccgcgtctgtctcg

SEQ ID NO: 5202 - DNA, 20 bp, Artificial
  20-mer unique DNA sequence
agcttcgatggcggtggttg

SEQ ID NO: 5203 - DNA, 20 bp, Artificial
  20-mer unique DNA sequence
cgcctcaacaattcaccgca

SEQ ID NO: 5204 - DNA, 20 bp, Artificial
  20-mer unique DNA sequence
ggggcaggcgcatggaatac

SEQ ID NO: 5205 - DNA, 20 bp, Artificial
  20-mer unique DNA sequence
gcggcaaggcagtacgtcaa

SEQ ID NO: 5206 - DNA, 20 bp, Artificial
  20-mer unique DNA sequence
aagaccacacccccgagcaa

SEQ ID NO: 5207 - DNA, 20 bp, Artificial
  20-mer unique DNA sequence
acggaaagcgggcaaagaca

SEQ ID NO: 5208 - DNA, 20 bp, Artificial
  20-mer unique DNA sequence
tagcagcaggtaggcggggg

SEQ ID NO: 5209 - DNA, 20 bp, Artificial
  20-mer unique DNA sequence
actgatgcgtggtggttgcg

SEQ ID NO: 5210 - DNA, 20 bp, Artificial
  20-mer unique DNA sequence
tttgcgacgtgcgtaccgtt

SEQ ID NO: 5211 - DNA, 20 bp, Artificial
  20-mer unique DNA sequence
cagtgagggaccgagccgtt

SEQ ID NO: 5212 - DNA, 20 bp, Artificial
  20-mer unique DNA sequence
cggcgccatcagaacccatt

SEQ ID NO: 5213 - DNA, 20 bp, Artificial
  20-mer unique DNA sequence
cctttaacccacgcgcccag

SEQ ID NO: 5214 - DNA, 20 bp, Artificial
  20-mer unique DNA sequence
cggacctatccgagccacaa

SEQ ID NO: 5215 - DNA, 20 bp, Artificial
  20-mer unique DNA sequence
aaactcacgtggtcgccagc

SEQ ID NO: 5216 - DNA, 20 bp, Artificial
  20-mer unique DNA sequence
cctttctgctttggcgcccc

SEQ ID NO: 5217 - DNA, 20 bp, Artificial
  20-mer unique DNA sequence
tcttggaggccggatgctgt

SEQ ID NO: 5218 - DNA, 20 bp, Artificial
  20-mer unique DNA sequence
gggtgcgctttgctatttgc

SEQ ID NO: 5219 - DNA, 20 bp, Artificial
  20-mer unique DNA sequence
gcctccaagctactcccggg

SEQ ID NO: 5220 - DNA, 20 bp, Artificial
  20-mer unique DNA sequence
tttgggaagcgttggcagga

SEQ ID NO: 5221 - DNA, 20 bp, Artificial
  20-mer unique DNA sequence
gcagcggaggtcaaagaggc

SEQ ID NO: 5222 - DNA, 20 bp, Artificial
  20-mer unique DNA sequence
agcgagaacgaataggcggg

SEQ ID NO: 5223 - DNA, 20 bp, Artificial
  20-mer unique DNA sequence
gatatgcagagcggaggccc

SEQ ID NO: 5224 - DNA, 20 bp, Artificial
  20-mer unique DNA sequence
cgattgttttggccggctcc

SEQ ID NO: 5225 - DNA, 20 bp, Artificial
  20-mer unique DNA sequence
cagcgggaagcgagtggact

SEQ ID NO: 5226 - DNA, 20 bp, Artificial
  20-mer unique DNA sequence
cctcgggcggaagaattgaa

SEQ ID NO: 5227 - DNA, 20 bp, Artificial
  20-mer unique DNA sequence
ggtctttttgccattccgcg

SEQ ID NO: 5228 - DNA, 20 bp, Artificial
  20-mer unique DNA sequence
gttgcatgtgctgtcgggca

SEQ ID NO: 5229 - DNA, 20 bp, Artificial
  20-mer unique DNA sequence
tggtggtcaggccgcagtaa

SEQ ID NO: 5230 - DNA, 20 bp, Artificial
  20-mer unique DNA sequence
agccgccactagtccacgca

SEQ ID NO: 5231 - DNA, 20 bp, Artificial
  20-mer unique DNA sequence
tcggggcaggacatgtggag

SEQ ID NO: 5232 - DNA, 20 bp, Artificial
  20-mer unique DNA sequence
cccgacccacaacacgacaa

SEQ ID NO: 5233 - DNA, 20 bp, Artificial
  20-mer unique DNA sequence
gaagccagcaaagcagccgt

SEQ ID NO: 5234 - DNA, 20 bp, Artificial
  20-mer unique DNA sequence
ggcgtgtttgaggggttcga

SEQ ID NO: 5235 - DNA, 20 bp, Artificial
  20-mer unique DNA sequence
tgctgcccccgaatccttgt

SEQ ID NO: 5236 - DNA, 20 bp, Artificial
  20-mer unique DNA sequence
agctgtttcgcccgcatctc

SEQ ID NO: 5237 - DNA, 20 bp, Artificial
  20-mer unique DNA sequence
gggggccatgacggtacggt

SEQ ID NO: 5238 - DNA, 20 bp, Artificial
  20-mer unique DNA sequence
cgcccttcgcgggttcattt

SEQ ID NO: 5239 - DNA, 20 bp, Artificial
  20-mer unique DNA sequence
ctcgggcctcacaaattgcc

SEQ ID NO: 5240 - DNA, 20 bp, Artificial
  20-mer unique DNA sequence
tcgatgagagggagcgtgga

SEQ ID NO: 5241 - DNA, 20 bp, Artificial
  20-mer unique DNA sequence
catgtcccaaccgcccctta

SEQ ID NO: 5242 - DNA, 20 bp, Artificial
  20-mer unique DNA sequence
ttcactataccggcagcagc

SEQ ID NO: 5243 - DNA, 20 bp, Artificial
  20-mer unique DNA sequence
ccagggcgaaacgatgacgg

SEQ ID NO: 5244 - DNA, 20 bp, Artificial
  20-mer unique DNA sequence
agtgtagagtggccccttcg

SEQ ID NO: 5245 - DNA, 20 bp, Artificial
  20-mer unique DNA sequence
gcgactgtcatgtggcagga

SEQ ID NO: 5246 - DNA, 20 bp, Artificial
  20-mer unique DNA sequence
gcgcccgacccttaagaacc

SEQ ID NO: 5247 - DNA, 20 bp, Artificial
  20-mer unique DNA sequence
gtgtgctgagtggcgggtcg

SEQ ID NO: 5248 - DNA, 20 bp, Artificial
  20-mer unique DNA sequence
agcccaccgcgtccctattt

SEQ ID NO: 5249 - DNA, 20 bp, Artificial
  20-mer unique DNA sequence
tgagcgcggtgtaactgggg

SEQ ID NO: 5250 - DNA, 20 bp, Artificial
  20-mer unique DNA sequence
gatggggaacgagggaggcg

SEQ ID NO: 5251 - DNA, 20 bp, Artificial
  20-mer unique DNA sequence
acgccaccttctctcaccgc

SEQ ID NO: 5252 - DNA, 20 bp, Artificial
  20-mer unique DNA sequence
gcaacagggggagccaagaa

SEQ ID NO: 5253 - DNA, 20 bp, Artificial
  20-mer unique DNA sequence
gtctggcgggcttgctttgc

SEQ ID NO: 5254 - DNA, 20 bp, Artificial
  20-mer unique DNA sequence
ccacaaagatgcagcccgaa

SEQ ID NO: 5255 - DNA, 20 bp, Artificial
  20-mer unique DNA sequence
tgtcggtgcgtattggggga

SEQ ID NO: 5256 - DNA, 20 bp, Artificial
  20-mer unique DNA sequence
ccctcgccacctgcttcatt

SEQ ID NO: 5257 - DNA, 20 bp, Artificial
  20-mer unique DNA sequence
tggtttgtgagcattcggcc

SEQ ID NO: 5258 - DNA, 20 bp, Artificial
  20-mer unique DNA sequence
tgcgggcagaagttatgggg

SEQ ID NO: 5259 - DNA, 20 bp, Artificial
  20-mer unique DNA sequence
ggggctaattcgtcacgggg

SEQ ID NO: 5260 - DNA, 20 bp, Artificial
  20-mer unique DNA sequence
actgagccggtcgcaacata

SEQ ID NO: 5261 - DNA, 20 bp, Artificial
  20-mer unique DNA sequence
cccgggaaccaaagcaccta

SEQ ID NO: 5262 - DNA, 20 bp, Artificial
  20-mer unique DNA sequence
accccatggtacgcagacct

SEQ ID NO: 5263 - DNA, 20 bp, Artificial
  20-mer unique DNA sequence
ggtaactacgggcgctgaga

SEQ ID NO: 5264 - DNA, 20 bp, Artificial
  20-mer unique DNA sequence
accgaacacgggggagaggt

SEQ ID NO: 5265 - DNA, 20 bp, Artificial
  20-mer unique DNA sequence
ctcgcccgtgatggaattcg

SEQ ID NO: 5266 - DNA, 20 bp, Artificial
  20-mer unique DNA sequence
tgttggcggtgttgtgcagg

SEQ ID NO: 5267 - DNA, 20 bp, Artificial
  20-mer unique DNA sequence
tacacgccaccgaccccatc

SEQ ID NO: 5268 - DNA, 20 bp, Artificial
  20-mer unique DNA sequence
tcagcgaggaccggcatcaa

SEQ ID NO: 5269 - DNA, 20 bp, Artificial
  20-mer unique DNA sequence
acacggtgaccagcgaagac

SEQ ID NO: 5270 - DNA, 20 bp, Artificial
  20-mer unique DNA sequence
agcaggcagtcagcgcagtc

SEQ ID NO: 5271 - DNA, 20 bp, Artificial
  20-mer unique DNA sequence
cgtcgggcttcttactggtg

SEQ ID NO: 5272 - DNA, 20 bp, Artificial
  20-mer unique DNA sequence
aggtgggaaatcggggcgag

SEQ ID NO: 5273 - DNA, 20 bp, Artificial
  20-mer unique DNA sequence
ggggcaaaggagtgaggggg

SEQ ID NO: 5274 - DNA, 20 bp, Artificial
  20-mer unique DNA sequence
ggcgtgagcgtcgtgatgaa

SEQ ID NO: 5275 - DNA, 20 bp, Artificial
  20-mer unique DNA sequence
tcccagccatttcccgcttc

SEQ ID NO: 5276 - DNA, 20 bp, Artificial
  20-mer unique DNA sequence
ttgaggtcccgagaggtgct

SEQ ID NO: 5277 - DNA, 20 bp, Artificial
  20-mer unique DNA sequence
tgaccggcgttagtcgctca

SEQ ID NO: 5278 - DNA, 20 bp, Artificial
  20-mer unique DNA sequence
ctagcttgccccccccgaaa

SEQ ID NO: 5279 - DNA, 20 bp, Artificial
  20-mer unique DNA sequence
gactgatcgtgcccagggat

SEQ ID NO: 5280 - DNA, 20 bp, Artificial
  20-mer unique DNA sequence
ccaaccacaggcacccaagc

SEQ ID NO: 5281 - DNA, 20 bp, Artificial
  20-mer unique DNA sequence
gcttcgctcctcacctccgg

SEQ ID NO: 5282 - DNA, 20 bp, Artificial
  20-mer unique DNA sequence
ggctgcggcttgggagtaca

SEQ ID NO: 5283 - DNA, 20 bp, Artificial
  20-mer unique DNA sequence
accgccgtccacctcatcga

SEQ ID NO: 5284 - DNA, 20 bp, Artificial
  20-mer unique DNA sequence
aagggggcgcatattctgag

SEQ ID NO: 5285 - DNA, 20 bp, Artificial
  20-mer unique DNA sequence
ggccaacaaccgtccgctat

SEQ ID NO: 5286 - DNA, 20 bp, Artificial
  20-mer unique DNA sequence
agcgggcgttggaaaataca

SEQ ID NO: 5287 - DNA, 20 bp, Artificial
  20-mer unique DNA sequence
taaaccccccgccacgagta

SEQ ID NO: 5288 - DNA, 20 bp, Artificial
  20-mer unique DNA sequence
acccattaactccccgccgt

SEQ ID NO: 5289 - DNA, 20 bp, Artificial
  20-mer unique DNA sequence
agcgtgtgaggggtgcgtgg

SEQ ID NO: 5290 - DNA, 20 bp, Artificial
  20-mer unique DNA sequence
tcacgcatcccctgccactc

SEQ ID NO: 5291 - DNA, 20 bp, Artificial
  20-mer unique DNA sequence
aaggattgaaacgggtggcg

SEQ ID NO: 5292 - DNA, 20 bp, Artificial
  20-mer unique DNA sequence
accgccatgcccttccgtag

SEQ ID NO: 5293 - DNA, 20 bp, Artificial
  20-mer unique DNA sequence
cgctgctcccgttgttctca

SEQ ID NO: 5294 - DNA, 20 bp, Artificial
  20-mer unique DNA sequence
cttcacccaccgccctgttt

SEQ ID NO: 5295 - DNA, 20 bp, Artificial
  20-mer unique DNA sequence
aaggtcgccgtctcaacgat

SEQ ID NO: 5296 - DNA, 20 bp, Artificial
  20-mer unique DNA sequence
gacagcggcacacaacgggt

SEQ ID NO: 5297 - DNA, 20 bp, Artificial
  20-mer unique DNA sequence
tgatgtgccccgtggtttgg

SEQ ID NO: 5298 - DNA, 20 bp, Artificial
  20-mer unique DNA sequence
gcgccacaaccaccttgcac

SEQ ID NO: 5299 - DNA, 20 bp, Artificial
  20-mer unique DNA sequence
gatccagtcgcacgcaaagc

SEQ ID NO: 5300 - DNA, 20 bp, Artificial
  20-mer unique DNA sequence
tggtggagattgaggccggc

SEQ ID NO: 5301 - DNA, 20 bp, Artificial
  20-mer unique DNA sequence
gtaggcaggcatgggcaggt

SEQ ID NO: 5302 - DNA, 20 bp, Artificial
  20-mer unique DNA sequence
tggatgggcggagagtcggt

SEQ ID NO: 5303 - DNA, 20 bp, Artificial
  20-mer unique DNA sequence
gaacaccgcccctgcaaatt

SEQ ID NO: 5304 - DNA, 20 bp, Artificial
  20-mer unique DNA sequence
ctcgcaccccatcacccagc

SEQ ID NO: 5305 - DNA, 20 bp, Artificial
  20-mer unique DNA sequence
aggggagggagcggcggtat

SEQ ID NO: 5306 - DNA, 20 bp, Artificial
  20-mer unique DNA sequence
gtagacatcgcgccccaacg

SEQ ID NO: 5307 - DNA, 20 bp, Artificial
  20-mer unique DNA sequence
gacggataggcaaacccccc

SEQ ID NO: 5308 - DNA, 20 bp, Artificial
  20-mer unique DNA sequence
gtggggctccggtttcaaga

SEQ ID NO: 5309 - DNA, 20 bp, Artificial
  20-mer unique DNA sequence
agcagaacagcggggaacgt

SEQ ID NO: 5310 - DNA, 20 bp, Artificial
  20-mer unique DNA sequence
tcggcctcatgtcgcttttt

SEQ ID NO: 5311 - DNA, 20 bp, Artificial
  20-mer unique DNA sequence
ggctcttcgctgcactccgg

SEQ ID NO: 5312 - DNA, 20 bp, Artificial
  20-mer unique DNA sequence
cgccctgtgcagacgctaac

SEQ ID NO: 5313 - DNA, 20 bp, Artificial
  20-mer unique DNA sequence
catgcgagcaggggtcaaga

SEQ ID NO: 5314 - DNA, 20 bp, Artificial
  20-mer unique DNA sequence
ttgggcattgtttggagcgg

SEQ ID NO: 5315 - DNA, 20 bp, Artificial
  20-mer unique DNA sequence
attgcgcatggacgtagggg

SEQ ID NO: 5316 - DNA, 20 bp, Artificial
  20-mer unique DNA sequence
ggggttcgctcgcggtgtac

SEQ ID NO: 5317 - DNA, 20 bp, Artificial
  20-mer unique DNA sequence
ggtgcgggttgggaatggtc

SEQ ID NO: 5318 - DNA, 20 bp, Artificial
  20-mer unique DNA sequence
cgccgaccttcctacccacg

SEQ ID NO: 5319 - DNA, 20 bp, Artificial
  20-mer unique DNA sequence
tgcgggagatggggtcagag

SEQ ID NO: 5320 - DNA, 20 bp, Artificial
  20-mer unique DNA sequence
cctcgttctcccaaggcccg

SEQ ID NO: 5321 - DNA, 20 bp, Artificial
  20-mer unique DNA sequence
ctaaagtcggctctcgcgcg

SEQ ID NO: 5322 - DNA, 20 bp, Artificial
  20-mer unique DNA sequence
gcgagcaacaaggcgaccaa

SEQ ID NO: 5323 - DNA, 20 bp, Artificial
  20-mer unique DNA sequence
tgaacgtcgatagcgggcgg

SEQ ID NO: 5324 - DNA, 20 bp, Artificial
  20-mer unique DNA sequence
agaaacacccgcgccacctc

SEQ ID NO: 5325 - DNA, 20 bp, Artificial
  20-mer unique DNA sequence
cagggtagcgaggagagcgg

SEQ ID NO: 5326 - DNA, 20 bp, Artificial
  20-mer unique DNA sequence
gcccctccggtcccaagtac

SEQ ID NO: 5327 - DNA, 20 bp, Artificial
  20-mer unique DNA sequence
ccaccacaattttccgccct

SEQ ID NO: 5328 - DNA, 20 bp, Artificial
  20-mer unique DNA sequence
tgaggtctatggcggggcag

SEQ ID NO: 5329 - DNA, 20 bp, Artificial
  20-mer unique DNA sequence
tactcctccctcacccccga

SEQ ID NO: 5330 - DNA, 20 bp, Artificial
  20-mer unique DNA sequence
tccacccagtctcccgccct

SEQ ID NO: 5331 - DNA, 20 bp, Artificial
  20-mer unique DNA sequence
tacccgcccacgcgacatta

SEQ ID NO: 5332 - DNA, 20 bp, Artificial
  20-mer unique DNA sequence
attcgttgagcttcgccggg

SEQ ID NO: 5333 - DNA, 20 bp, Artificial
  20-mer unique DNA sequence
tagggccggagtcgtcaaag

SEQ ID NO: 5334 - DNA, 20 bp, Artificial
  20-mer unique DNA sequence
atagttgcggggacctcgga

SEQ ID NO: 5335 - DNA, 20 bp, Artificial
  20-mer unique DNA sequence
atcgttgtcttcccggcctc

SEQ ID NO: 5336 - DNA, 20 bp, Artificial
  20-mer unique DNA sequence
ttgcatttcccccctggtga

SEQ ID NO: 5337 - DNA, 20 bp, Artificial
  20-mer unique DNA sequence
gttgcgcgacttgatgagcc

SEQ ID NO: 5338 - DNA, 20 bp, Artificial
  20-mer unique DNA sequence
aagcgtccgtcccctggtta

SEQ ID NO: 5339 - DNA, 20 bp, Artificial
  20-mer unique DNA sequence
aactcatcccctccccccac

SEQ ID NO: 5340 - DNA, 20 bp, Artificial
  20-mer unique DNA sequence
aggggagcagccgaggttta

SEQ ID NO: 5341 - DNA, 20 bp, Artificial
  20-mer unique DNA sequence
cggttgcgcggttaatgaaa

SEQ ID NO: 5342 - DNA, 20 bp, Artificial
  20-mer unique DNA sequence
cgggtggctatttctggcgc

SEQ ID NO: 5343 - DNA, 20 bp, Artificial
  20-mer unique DNA sequence
ttccgacgctaatggccccc

SEQ ID NO: 5344 - DNA, 20 bp, Artificial
  20-mer unique DNA sequence
aggcgtcttccgttcgtgca

SEQ ID NO: 5345 - DNA, 20 bp, Artificial
  20-mer unique DNA sequence
gctttaatcgctgccgcctc

SEQ ID NO: 5346 - DNA, 20 bp, Artificial
  20-mer unique DNA sequence
gtgagggataacgcgccgaa

SEQ ID NO: 5347 - DNA, 20 bp, Artificial
  20-mer unique DNA sequence
gaaatttgcttcgcgggcct

SEQ ID NO: 5348 - DNA, 20 bp, Artificial
  20-mer unique DNA sequence
tttcggttgcaggtgctggc

SEQ ID NO: 5349 - DNA, 20 bp, Artificial
  20-mer unique DNA sequence
gcgcactcgctccataacga

SEQ ID NO: 5350 - DNA, 20 bp, Artificial
  20-mer unique DNA sequence
aggcggttagggggtgagga

SEQ ID NO: 5351 - DNA, 20 bp, Artificial
  20-mer unique DNA sequence
tcgcccacgactgactgcat

SEQ ID NO: 5352 - DNA, 20 bp, Artificial
  20-mer unique DNA sequence
tccccggctttacctcgcaa

SEQ ID NO: 5353 - DNA, 20 bp, Artificial
  20-mer unique DNA sequence
agggccgaactggtaggggc

SEQ ID NO: 5354 - DNA, 20 bp, Artificial
  20-mer unique DNA sequence
gaagcaacgggaacagcacg

SEQ ID NO: 5355 - DNA, 20 bp, Artificial
  20-mer unique DNA sequence
tggtcgcttcgcttcccttg

SEQ ID NO: 5356 - DNA, 20 bp, Artificial
  20-mer unique DNA sequence
ttgggcgggaacaaggaaga

SEQ ID NO: 5357 - DNA, 20 bp, Artificial
  20-mer unique DNA sequence
ccaccttgtttttgcggacc

SEQ ID NO: 5358 - DNA, 20 bp, Artificial
  20-mer unique DNA sequence
cgccctcccagcatgtcgta

SEQ ID NO: 5359 - DNA, 20 bp, Artificial
  20-mer unique DNA sequence
tcacaagcccgaaccctcca

SEQ ID NO: 5360 - DNA, 20 bp, Artificial
  20-mer unique DNA sequence
atgagcggcgagagggggaa

SEQ ID NO: 5361 - DNA, 20 bp, Artificial
  20-mer unique DNA sequence
ttgcacgagctagacgcgcc

SEQ ID NO: 5362 - DNA, 20 bp, Artificial
  20-mer unique DNA sequence
cctcgccctggttgtgtcct

SEQ ID NO: 5363 - DNA, 20 bp, Artificial
  20-mer unique DNA sequence
gagttatgggcgtcgggtgc

SEQ ID NO: 5364 - DNA, 20 bp, Artificial
  20-mer unique DNA sequence
acatctttgtcgtccctgcg

SEQ ID NO: 5365 - DNA, 20 bp, Artificial
  20-mer unique DNA sequence
ccgccaaccccgtgtacacc

SEQ ID NO: 5366 - DNA, 20 bp, Artificial
  20-mer unique DNA sequence
gcacgggatgggggaaaatt

SEQ ID NO: 5367 - DNA, 20 bp, Artificial
  20-mer unique DNA sequence
cgagggcacgaggttacgca

SEQ ID NO: 5368 - DNA, 20 bp, Artificial
  20-mer unique DNA sequence
gtgggtgagtccggaagggg

SEQ ID NO: 5369 - DNA, 20 bp, Artificial
  20-mer unique DNA sequence
tttcctaagcttccgggccc

SEQ ID NO: 5370 - DNA, 20 bp, Artificial
  20-mer unique DNA sequence
ggggcggggtccttgatact

SEQ ID NO: 5371 - DNA, 20 bp, Artificial
  20-mer unique DNA sequence
ccgtcctgcacctgtttccg

SEQ ID NO: 5372 - DNA, 20 bp, Artificial
  20-mer unique DNA sequence
tcaccacgctcaacccgaag

SEQ ID NO: 5373 - DNA, 20 bp, Artificial
  20-mer unique DNA sequence
agcggtattgccttgggtgc

SEQ ID NO: 5374 - DNA, 20 bp, Artificial
  20-mer unique DNA sequence
taagtcctctcccccgcccc

SEQ ID NO: 5375 - DNA, 20 bp, Artificial
  20-mer unique DNA sequence
gcaaaccgaacgcccagaaa

SEQ ID NO: 5376 - DNA, 20 bp, Artificial
  20-mer unique DNA sequence
agatccggcaaccccgctgt

SEQ ID NO: 5377 - DNA, 20 bp, Artificial
  20-mer unique DNA sequence
ccccaccgagtaccatgtca

SEQ ID NO: 5378 - DNA, 20 bp, Artificial
  20-mer unique DNA sequence
cgcaaagccccacggtaaga

SEQ ID NO: 5379 - DNA, 20 bp, Artificial
  20-mer unique DNA sequence
tgccgtgacgtctgtgactc

SEQ ID NO: 5380 - DNA, 20 bp, Artificial
  20-mer unique DNA sequence
gcctctagccgtccccatgc

SEQ ID NO: 5381 - DNA, 20 bp, Artificial
  20-mer unique DNA sequence
tacggctggggctttgcagg

SEQ ID NO: 5382 - DNA, 20 bp, Artificial
  20-mer unique DNA sequence
gtggggcatattgcaggcga

SEQ ID NO: 5383 - DNA, 20 bp, Artificial
  20-mer unique DNA sequence
cgcgccaccctaacaactga

SEQ ID NO: 5384 - DNA, 20 bp, Artificial
  20-mer unique DNA sequence
agcggccctgagcaagaaaa

SEQ ID NO: 5385 - DNA, 20 bp, Artificial
  20-mer unique DNA sequence
tttcggaggtgagtgcgtgc

SEQ ID NO: 5386 - DNA, 20 bp, Artificial
  20-mer unique DNA sequence
gtgggagcgcgcggataatg

SEQ ID NO: 5387 - DNA, 20 bp, Artificial
  20-mer unique DNA sequence
cctgcagctttccgtcgtcc

SEQ ID NO: 5388 - DNA, 20 bp, Artificial
  20-mer unique DNA sequence
cccgttacgccaggacaagt

SEQ ID NO: 5389 - DNA, 20 bp, Artificial
  20-mer unique DNA sequence
gaacgcgaccgtcctctctt

SEQ ID NO: 5390 - DNA, 20 bp, Artificial
  20-mer unique DNA sequence
cgcggggtttgcctagtgac

SEQ ID NO: 5391 - DNA, 20 bp, Artificial
  20-mer unique DNA sequence
tcagaactcaggcccacccc

SEQ ID NO: 5392 - DNA, 20 bp, Artificial
  20-mer unique DNA sequence
ctttccgcgcaagccatgta

SEQ ID NO: 5393 - DNA, 20 bp, Artificial
  20-mer unique DNA sequence
caggcggatggagcgttacc

SEQ ID NO: 5394 - DNA, 20 bp, Artificial
  20-mer unique DNA sequence
ccagcggggaaaaaaaccgg

SEQ ID NO: 5395 - DNA, 20 bp, Artificial
  20-mer unique DNA sequence
ggcgttccatcgtgcgtcat

SEQ ID NO: 5396 - DNA, 20 bp, Artificial
  20-mer unique DNA sequence
gaaccaattgcccattcgcc

SEQ ID NO: 5397 - DNA, 20 bp, Artificial
  20-mer unique DNA sequence
tggtcacgtgaatcgcggca

SEQ ID NO: 5398 - DNA, 20 bp, Artificial
  20-mer unique DNA sequence
ccgtgccagttcgttcgtcg

SEQ ID NO: 5399 - DNA, 20 bp, Artificial
  20-mer unique DNA sequence
cttatcgcccctcagacccg

SEQ ID NO: 5400 - DNA, 20 bp, Artificial
  20-mer unique DNA sequence
tcctagctagcgacctggca

SEQ ID NO: 5401 - DNA, 20 bp, Artificial
  20-mer unique DNA sequence
cgacacgggttcggagagat

SEQ ID NO: 5402 - DNA, 20 bp, Artificial
  20-mer unique DNA sequence
ctggggcctgtgcgtacgtt

SEQ ID NO: 5403 - DNA, 20 bp, Artificial
  20-mer unique DNA sequence
cctctcccattcctcgcacg

SEQ ID NO: 5404 - DNA, 20 bp, Artificial
  20-mer unique DNA sequence
aatggtaggagaggggcgcc

SEQ ID NO: 5405 - DNA, 20 bp, Artificial
  20-mer unique DNA sequence
tttgtccggagtgcgcatgc

SEQ ID NO: 5406 - DNA, 20 bp, Artificial
  20-mer unique DNA sequence
atcatggggtccgggctttg

SEQ ID NO: 5407 - DNA, 20 bp, Artificial
  20-mer unique DNA sequence
tgtaatccgcgcaaacgtcg

SEQ ID NO: 5408 - DNA, 20 bp, Artificial
  20-mer unique DNA sequence
cacgcccccccctgagatgt

SEQ ID NO: 5409 - DNA, 20 bp, Artificial
  20-mer unique DNA sequence
tgacccccgcacgaatgacc

SEQ ID NO: 5410 - DNA, 20 bp, Artificial
  20-mer unique DNA sequence
cacgccggattctgtccacc

SEQ ID NO: 5411 - DNA, 20 bp, Artificial
  20-mer unique DNA sequence
tgactgacgcccgcctttct

SEQ ID NO: 5412 - DNA, 20 bp, Artificial
  20-mer unique DNA sequence
cccccgctttcttgcatcac

SEQ ID NO: 5413 - DNA, 20 bp, Artificial
  20-mer unique DNA sequence
ccaagccacccctacgccag

SEQ ID NO: 5414 - DNA, 20 bp, Artificial
  20-mer unique DNA sequence
cgtgtaaaaggcgcgaacca

SEQ ID NO: 5415 - DNA, 20 bp, Artificial
  20-mer unique DNA sequence
gagcggtggggacgaggaac

SEQ ID NO: 5416 - DNA, 20 bp, Artificial
  20-mer unique DNA sequence
caaaaccgggaaggcaacgc

SEQ ID NO: 5417 - DNA, 20 bp, Artificial
  20-mer unique DNA sequence
cgccggacccataccacagt

SEQ ID NO: 5418 - DNA, 20 bp, Artificial
  20-mer unique DNA sequence
tttttgcaaccgaagcccgt

SEQ ID NO: 5419 - DNA, 20 bp, Artificial
  20-mer unique DNA sequence
gcggtcttggctgctgttgc

SEQ ID NO: 5420 - DNA, 20 bp, Artificial
  20-mer unique DNA sequence
cggttcacatggggcgtttc

SEQ ID NO: 5421 - DNA, 20 bp, Artificial
  20-mer unique DNA sequence
acctgctcatggcctttttt

SEQ ID NO: 5422 - DNA, 20 bp, Artificial
  20-mer unique DNA sequence
ggatcgcccccagatgagac

SEQ ID NO: 5423 - DNA, 20 bp, Artificial
  20-mer unique DNA sequence
ttatgtcagaacaaccgcgg

SEQ ID NO: 5424 - DNA, 20 bp, Artificial
  20-mer unique DNA sequence
ttgtcccgatagctctgccg

SEQ ID NO: 5425 - DNA, 20 bp, Artificial
  20-mer unique DNA sequence
atgggccctctcggatgttg

SEQ ID NO: 5426 - DNA, 20 bp, Artificial
  20-mer unique DNA sequence
ggtaccccctctgcacagcc

SEQ ID NO: 5427 - DNA, 20 bp, Artificial
  20-mer unique DNA sequence
ccgcttgatgtccgcctttc

SEQ ID NO: 5428 - DNA, 20 bp, Artificial
  20-mer unique DNA sequence
ggcctcaaacgcgcagcata

SEQ ID NO: 5429 - DNA, 20 bp, Artificial
  20-mer unique DNA sequence
gcctgccgatgcccgtatac

SEQ ID NO: 5430 - DNA, 20 bp, Artificial
  20-mer unique DNA sequence
cgggtcatcaaaagggtggc

SEQ ID NO: 5431 - DNA, 20 bp, Artificial
  20-mer unique DNA sequence
tgcgaagtaccccaagcggc

SEQ ID NO: 5432 - DNA, 20 bp, Artificial
  20-mer unique DNA sequence
cacaaacccccgatctcccg

SEQ ID NO: 5433 - DNA, 20 bp, Artificial
  20-mer unique DNA sequence
agggaagcaggatcggggag

SEQ ID NO: 5434 - DNA, 20 bp, Artificial
  20-mer unique DNA sequence
gcgtaggtgcgcggacagag

SEQ ID NO: 5435 - DNA, 20 bp, Artificial
  20-mer unique DNA sequence
gcgcccctctcgtgcttgtt

SEQ ID NO: 5436 - DNA, 20 bp, Artificial
  20-mer unique DNA sequence
cagttagctccgtgcgaggt

SEQ ID NO: 5437 - DNA, 20 bp, Artificial
  20-mer unique DNA sequence
aacgcgtactgacggagtgg

SEQ ID NO: 5438 - DNA, 20 bp, Artificial
  20-mer unique DNA sequence
aggctcacgtgctcgtcaca

SEQ ID NO: 5439 - DNA, 20 bp, Artificial
  20-mer unique DNA sequence
cgatcgccgcgttattcgct

SEQ ID NO: 5440 - DNA, 20 bp, Artificial
  20-mer unique DNA sequence
atacccttacggctgcaccg

SEQ ID NO: 5441 - DNA, 20 bp, Artificial
  20-mer unique DNA sequence
tcaaggactcgtacgctcgg

SEQ ID NO: 5442 - DNA, 20 bp, Artificial
  20-mer unique DNA sequence
atccgtgcgacgctaagcag

SEQ ID NO: 5443 - DNA, 20 bp, Artificial
  20-mer unique DNA sequence
atggacgtccgtgtgttccc

SEQ ID NO: 5444 - DNA, 20 bp, Artificial
  20-mer unique DNA sequence
cgggtccttacgtcgcatct

SEQ ID NO: 5445 - DNA, 20 bp, Artificial
  20-mer unique DNA sequence
cgaccggagttactcacgca

SEQ ID NO: 5446 - DNA, 20 bp, Artificial
  20-mer unique DNA sequence
ggaggtcactatgcggccaa

SEQ ID NO: 5447 - DNA, 20 bp, Artificial
  20-mer unique DNA sequence
catgcgaggttgaccgctct

SEQ ID NO: 5448 - DNA, 20 bp, Artificial
  20-mer unique DNA sequence
cacttgtggtacgggcggtt

SEQ ID NO: 5449 - DNA, 20 bp, Artificial
  20-mer unique DNA sequence
taggcgtggccttagcgaga

SEQ ID NO: 5450 - DNA, 20 bp, Artificial
  20-mer unique DNA sequence
acttccggcaatcacgtgga

SEQ ID NO: 5451 - DNA, 20 bp, Artificial
  20-mer unique DNA sequence
cgacgccctgcgcatataga

SEQ ID NO: 5452 - DNA, 20 bp, Artificial
  20-mer unique DNA sequence
gagcatcgtccagccgacat

SEQ ID NO: 5453 - DNA, 20 bp, Artificial
  20-mer unique DNA sequence
ttcatcccggacacgtcgct

SEQ ID NO: 5454 - DNA, 20 bp, Artificial
  20-mer unique DNA sequence
ttcactcgaccgtggcgact

SEQ ID NO: 5455 - DNA, 20 bp, Artificial
  20-mer unique DNA sequence
aaccggtcgactccggatgt

SEQ ID NO: 5456 - DNA, 20 bp, Artificial
  20-mer unique DNA sequence
tcgaaagcgaccctaggcga

SEQ ID NO: 5457 - DNA, 20 bp, Artificial
  20-mer unique DNA sequence
atctctctgcgcgaccacaa

SEQ ID NO: 5458 - DNA, 20 bp, Artificial
  20-mer unique DNA sequence
tggagcggacagatcaagcc

SEQ ID NO: 5459 - DNA, 20 bp, Artificial
  20-mer unique DNA sequence
tactcacctgggcggaccaa

SEQ ID NO: 5460 - DNA, 20 bp, Artificial
  20-mer unique DNA sequence
ctgtgagcgccagtgtgagt

SEQ ID NO: 5461 - DNA, 20 bp, Artificial
  20-mer unique DNA sequence
tgtcgcgaccgctagcgaaa

SEQ ID NO: 5462 - DNA, 20 bp, Artificial
  20-mer unique DNA sequence
cgcccaccaattcgagctct

SEQ ID NO: 5463 - DNA, 20 bp, Artificial
  20-mer unique DNA sequence
aaaggcggtgctcaatcggg

SEQ ID NO: 5464 - DNA, 20 bp, Artificial
  20-mer unique DNA sequence
ccccacggtcctacccagcc

SEQ ID NO: 5465 - DNA, 20 bp, Artificial
  20-mer unique DNA sequence
gctacacgcgacatcacgcc

SEQ ID NO: 5466 - DNA, 20 bp, Artificial
  20-mer unique DNA sequence
tgtggcggctgcgagatctt

SEQ ID NO: 5467 - DNA, 20 bp, Artificial
  20-mer unique DNA sequence
acggcaggcgtagaatggtt

SEQ ID NO: 5468 - DNA, 20 bp, Artificial
  20-mer unique DNA sequence
accaagctatcacccccgcg

SEQ ID NO: 5469 - DNA, 20 bp, Artificial
  20-mer unique DNA sequence
gttccccgtcttttgccagc

SEQ ID NO: 5470 - DNA, 20 bp, Artificial
  20-mer unique DNA sequence
tacccgtcctggcttctggc

SEQ ID NO: 5471 - DNA, 20 bp, Artificial
  20-mer unique DNA sequence
caacggccgggacatcaaga

SEQ ID NO: 5472 - DNA, 20 bp, Artificial
  20-mer unique DNA sequence
gtgaactgggggcgacttgg

SEQ ID NO: 5473 - DNA, 20 bp, Artificial
  20-mer unique DNA sequence
aagcgattacccctgcacgg

SEQ ID NO: 5474 - DNA, 20 bp, Artificial
  20-mer unique DNA sequence
cgggccagctgaaaagaggt

SEQ ID NO: 5475 - DNA, 20 bp, Artificial
  20-mer unique DNA sequence
cactaaatttccgccccccc

SEQ ID NO: 5476 - DNA, 20 bp, Artificial
  20-mer unique DNA sequence
tttcggtcacccgagttggt

SEQ ID NO: 5477 - DNA, 20 bp, Artificial
  20-mer unique DNA sequence
tgtgccgcagtacctggatt

SEQ ID NO: 5478 - DNA, 20 bp, Artificial
  20-mer unique DNA sequence
atctccaacgggcgaacctg

SEQ ID NO: 5479 - DNA, 20 bp, Artificial
  20-mer unique DNA sequence
gcggccatggttcgatacaa

SEQ ID NO: 5480 - DNA, 20 bp, Artificial
  20-mer unique DNA sequence
cggattcagtccacatgcgg

SEQ ID NO: 5481 - DNA, 20 bp, Artificial
  20-mer unique DNA sequence
ctgccgacgcttcatggacc

SEQ ID NO: 5482 - DNA, 20 bp, Artificial
  20-mer unique DNA sequence
ggacctccccgctggcattt

SEQ ID NO: 5483 - DNA, 20 bp, Artificial
  20-mer unique DNA sequence
gggacgagccatgaccgggt

SEQ ID NO: 5484 - DNA, 20 bp, Artificial
  20-mer unique DNA sequence
tccgaaaggcctgaaagcga

SEQ ID NO: 5485 - DNA, 20 bp, Artificial
  20-mer unique DNA sequence
atttttgcccgacacctccg

SEQ ID NO: 5486 - DNA, 20 bp, Artificial
  20-mer unique DNA sequence
ctccccttgaaatacgcccg

SEQ ID NO: 5487 - DNA, 20 bp, Artificial
  20-mer unique DNA sequence
tctgcgtttcggggtggctt

SEQ ID NO: 5488 - DNA, 20 bp, Artificial
  20-mer unique DNA sequence
acaaacacgcggcaacatcg

SEQ ID NO: 5489 - DNA, 20 bp, Artificial
  20-mer unique DNA sequence
ctgttttttggccgggacga

SEQ ID NO: 5490 - DNA, 20 bp, Artificial
  20-mer unique DNA sequence
acgcgcagactctccccctc

SEQ ID NO: 5491 - DNA, 20 bp, Artificial
  20-mer unique DNA sequence
catgaaaggggggcagtcca

SEQ ID NO: 5492 - DNA, 20 bp, Artificial
  20-mer unique DNA sequence
ggggcactggactcgggatg

SEQ ID NO: 5493 - DNA, 20 bp, Artificial
  20-mer unique DNA sequence
tagggcgtgcgaagggaaat

SEQ ID NO: 5494 - DNA, 20 bp, Artificial
  20-mer unique DNA sequence
cctcgcgcatgctcccaata

SEQ ID NO: 5495 - DNA, 20 bp, Artificial
  20-mer unique DNA sequence
ggggctgagatgtagggcca

SEQ ID NO: 5496 - DNA, 20 bp, Artificial
  20-mer unique DNA sequence
accgcgatgccacaccccca

SEQ ID NO: 5497 - DNA, 20 bp, Artificial
  20-mer unique DNA sequence
cgaacccgccacaacccaga

SEQ ID NO: 5498 - DNA, 20 bp, Artificial
  20-mer unique DNA sequence
ctcgtgtgtttgcggctggc

SEQ ID NO: 5499 - DNA, 20 bp, Artificial
  20-mer unique DNA sequence
ttgaggacttggcaccgcgt

SEQ ID NO: 5500 - DNA, 20 bp, Artificial
  20-mer unique DNA sequence
cgcccagtactcccaacgcc

SEQ ID NO: 5501 - DNA, 20 bp, Artificial
  20-mer unique DNA sequence
tgactttggcgctgaggggg

SEQ ID NO: 5502 - DNA, 20 bp, Artificial
  20-mer unique DNA sequence
tcgggtcgtgcggttctagc

SEQ ID NO: 5503 - DNA, 20 bp, Artificial
  20-mer unique DNA sequence
agcgtttctgcgatgcggtc

SEQ ID NO: 5504 - DNA, 20 bp, Artificial
  20-mer unique DNA sequence
ttcaaaacgcgcggggactg

SEQ ID NO: 5505 - DNA, 20 bp, Artificial
  20-mer unique DNA sequence
accccggctccttcctatgg

SEQ ID NO: 5506 - DNA, 20 bp, Artificial
  20-mer unique DNA sequence
aaaccgccaattcgcagcct

SEQ ID NO: 5507 - DNA, 20 bp, Artificial
  20-mer unique DNA sequence
gcagggcacggttagggaag

SEQ ID NO: 5508 - DNA, 20 bp, Artificial
  20-mer unique DNA sequence
gcctgaatcgacgtgcctca

SEQ ID NO: 5509 - DNA, 20 bp, Artificial
  20-mer unique DNA sequence
tcgaacttccctgggcgaga

SEQ ID NO: 5510 - DNA, 20 bp, Artificial
  20-mer unique DNA sequence
tccatccaaccgccgtcata

SEQ ID NO: 5511 - DNA, 20 bp, Artificial
  20-mer unique DNA sequence
cacctccgaaaatcccgcct

SEQ ID NO: 5512 - DNA, 20 bp, Artificial
  20-mer unique DNA sequence
aaaatggcgcggacaatgca

SEQ ID NO: 5513 - DNA, 20 bp, Artificial
  20-mer unique DNA sequence
agatggacgggcagcaagca

SEQ ID NO: 5514 - DNA, 20 bp, Artificial
  20-mer unique DNA sequence
accctgcacaacgagcccct

SEQ ID NO: 5515 - DNA, 20 bp, Artificial
  20-mer unique DNA sequence
cccgatccgcgcataaagtt

SEQ ID NO: 5516 - DNA, 20 bp, Artificial
  20-mer unique DNA sequence
gacggcgcggagctgagaaa

SEQ ID NO: 5517 - DNA, 20 bp, Artificial
  20-mer unique DNA sequence
gtccgttgggctgcgtgtcc

SEQ ID NO: 5518 - DNA, 20 bp, Artificial
  20-mer unique DNA sequence
acgaccttacccgcacccaa

SEQ ID NO: 5519 - DNA, 20 bp, Artificial
  20-mer unique DNA sequence
actggcttccccgactcccg

SEQ ID NO: 5520 - DNA, 20 bp, Artificial
  20-mer unique DNA sequence
agtgctggaaatgcgtgtcg

SEQ ID NO: 5521 - DNA, 20 bp, Artificial
  20-mer unique DNA sequence
tagaccgcacaaggagcccg

SEQ ID NO: 5522 - DNA, 20 bp, Artificial
  20-mer unique DNA sequence
cttcgggccacggcgattga

SEQ ID NO: 5523 - DNA, 20 bp, Artificial
  20-mer unique DNA sequence
ttggggccgacgatgatgag

SEQ ID NO: 5524 - DNA, 20 bp, Artificial
  20-mer unique DNA sequence
gggagagctcgccgaatgta

SEQ ID NO: 5525 - DNA, 20 bp, Artificial
  20-mer unique DNA sequence
ctatggtggaactcggcggg

SEQ ID NO: 5526 - DNA, 20 bp, Artificial
  20-mer unique DNA sequence
ccaaacacgctaccgaccca

SEQ ID NO: 5527 - DNA, 20 bp, Artificial
  20-mer unique DNA sequence
gtgaagggttaggggcggcg

SEQ ID NO: 5528 - DNA, 20 bp, Artificial
  20-mer unique DNA sequence
cttctcaactcgcctgcccg

SEQ ID NO: 5529 - DNA, 20 bp, Artificial
  20-mer unique DNA sequence
gtgcggggaagttagcgtcg

SEQ ID NO: 5530 - DNA, 20 bp, Artificial
  20-mer unique DNA sequence
attatggagctagcggccgg

SEQ ID NO: 5531 - DNA, 20 bp, Artificial
  20-mer unique DNA sequence
ataaatgggcgatcggggct

SEQ ID NO: 5532 - DNA, 20 bp, Artificial
  20-mer unique DNA sequence
atctcccgttcgcgctctcc

SEQ ID NO: 5533 - DNA, 20 bp, Artificial
  20-mer unique DNA sequence
ccaaatgaggcaagcgggtg

SEQ ID NO: 5534 - DNA, 20 bp, Artificial
  20-mer unique DNA sequence
gtaggtagcgcgctgtacaa

SEQ ID NO: 5535 - DNA, 20 bp, Artificial
  20-mer unique DNA sequence
tgtagcgatcgcgggaagtc

SEQ ID NO: 5536 - DNA, 20 bp, Artificial
  20-mer unique DNA sequence
gcttggactgggggaggttg

SEQ ID NO: 5537 - DNA, 20 bp, Artificial
  20-mer unique DNA sequence
tacatacagcggggaggcgg

SEQ ID NO: 5538 - DNA, 20 bp, Artificial
  20-mer unique DNA sequence
ccggcgatgtcgagatggac

SEQ ID NO: 5539 - DNA, 20 bp, Artificial
  20-mer unique DNA sequence
tgcttacgaccgcgccgatc

SEQ ID NO: 5540 - DNA, 20 bp, Artificial
  20-mer unique DNA sequence
gtcttgggtggcgaatggcg

SEQ ID NO: 5541 - DNA, 20 bp, Artificial
  20-mer unique DNA sequence
agtcgcagcgtgactaccag

SEQ ID NO: 5542 - DNA, 20 bp, Artificial
  20-mer unique DNA sequence
ctgggctgagggagggactg

SEQ ID NO: 5543 - DNA, 20 bp, Artificial
  20-mer unique DNA sequence
acattgaccgcttggccctg

SEQ ID NO: 5544 - DNA, 20 bp, Artificial
  20-mer unique DNA sequence
ttggggtcatggcgggtcta

SEQ ID NO: 5545 - DNA, 20 bp, Artificial
  20-mer unique DNA sequence
cgtgagttgcgaggatggcg

SEQ ID NO: 5546 - DNA, 20 bp, Artificial
  20-mer unique DNA sequence
cctatgacggaacggcccaa

SEQ ID NO: 5547 - DNA, 20 bp, Artificial
  20-mer unique DNA sequence
acgaatcgcgtggacgaaac

SEQ ID NO: 5548 - DNA, 20 bp, Artificial
  20-mer unique DNA sequence
tgatttgtcggttgggcgtc

SEQ ID NO: 5549 - DNA, 20 bp, Artificial
  20-mer unique DNA sequence
atcctgtccccctcttggca

SEQ ID NO: 5550 - DNA, 20 bp, Artificial
  20-mer unique DNA sequence
gccgacacctgcctgaaacc

SEQ ID NO: 5551 - DNA, 20 bp, Artificial
  20-mer unique DNA sequence
gaaaggaacgggggcatcga

SEQ ID NO: 5552 - DNA, 20 bp, Artificial
  20-mer unique DNA sequence
tacgcggttcgtctggcctc

SEQ ID NO: 5553 - DNA, 20 bp, Artificial
  20-mer unique DNA sequence
taggcggccgacggtttagt

SEQ ID NO: 5554 - DNA, 20 bp, Artificial
  20-mer unique DNA sequence
cgccgcttcactataccccg

SEQ ID NO: 5555 - DNA, 20 bp, Artificial
  20-mer unique DNA sequence
gaacatgtccaagggggcgc

SEQ ID NO: 5556 - DNA, 20 bp, Artificial
  20-mer unique DNA sequence
gacacgcaactcaaccgcca

SEQ ID NO: 5557 - DNA, 20 bp, Artificial
  20-mer unique DNA sequence
agggcgggtgtgcaggtatg

SEQ ID NO: 5558 - DNA, 20 bp, Artificial
  20-mer unique DNA sequence
ttccgccgcactgattacga

SEQ ID NO: 5559 - DNA, 20 bp, Artificial
  20-mer unique DNA sequence
tagcgccgggatgtttgcaa

SEQ ID NO: 5560 - DNA, 20 bp, Artificial
  20-mer unique DNA sequence
tgcctggagtggggggagat

SEQ ID NO: 5561 - DNA, 20 bp, Artificial
  20-mer unique DNA sequence
atcagctccaggccggtcca

SEQ ID NO: 5562 - DNA, 20 bp, Artificial
  20-mer unique DNA sequence
agaagcttgccggggtggta

SEQ ID NO: 5563 - DNA, 20 bp, Artificial
  20-mer unique DNA sequence
tgcgggtgccttacatttgg

SEQ ID NO: 5564 - DNA, 20 bp, Artificial
  20-mer unique DNA sequence
ttgatctgccttggaccccc

SEQ ID NO: 5565 - DNA, 20 bp, Artificial
  20-mer unique DNA sequence
accacaccacaaagccggcc

SEQ ID NO: 5566 - DNA, 20 bp, Artificial
  20-mer unique DNA sequence
acaaaaagggcgtcctcggg

SEQ ID NO: 5567 - DNA, 20 bp, Artificial
  20-mer unique DNA sequence
tgagatttgcgtcttgccgg

SEQ ID NO: 5568 - DNA, 20 bp, Artificial
  20-mer unique DNA sequence
gcgtattggtcggtgggcga

SEQ ID NO: 5569 - DNA, 20 bp, Artificial
  20-mer unique DNA sequence
tcgcagttccagtgttgggc

SEQ ID NO: 5570 - DNA, 20 bp, Artificial
  20-mer unique DNA sequence
cggcgttcacgacagtggtt

SEQ ID NO: 5571 - DNA, 20 bp, Artificial
  20-mer unique DNA sequence
caagtgcctgacgttcgcct

SEQ ID NO: 5572 - DNA, 20 bp, Artificial
  20-mer unique DNA sequence
ttaacggggctgcgtgtggc

SEQ ID NO: 5573 - DNA, 20 bp, Artificial
  20-mer unique DNA sequence
ctcacccgcccagacgtttt

SEQ ID NO: 5574 - DNA, 20 bp, Artificial
  20-mer unique DNA sequence
cttcctggcggggcgtgttt

SEQ ID NO: 5575 - DNA, 20 bp, Artificial
  20-mer unique DNA sequence
ggcttgcgttggggaattgg

SEQ ID NO: 5576 - DNA, 20 bp, Artificial
  20-mer unique DNA sequence
tgcaaaggcgtcgtcaggtt

SEQ ID NO: 5577 - DNA, 20 bp, Artificial
  20-mer unique DNA sequence
aggactcaatccaccaccac

SEQ ID NO: 5578 - DNA, 20 bp, Artificial
  20-mer unique DNA sequence
cgacacccgaagcaggcaac

SEQ ID NO: 5579 - DNA, 20 bp, Artificial
  20-mer unique DNA sequence
gtcaaccgcacccctgtcca

SEQ ID NO: 5580 - DNA, 20 bp, Artificial
  20-mer unique DNA sequence
gcgcgggggcatctaggtgt

SEQ ID NO: 5581 - DNA, 20 bp, Artificial
  20-mer unique DNA sequence
cccgccctaggatgcaagtc

SEQ ID NO: 5582 - DNA, 20 bp, Artificial
  20-mer unique DNA sequence
ggagtttggcctgtacgccc

SEQ ID NO: 5583 - DNA, 20 bp, Artificial
  20-mer unique DNA sequence
gccgcagaaaagacccgcta

SEQ ID NO: 5584 - DNA, 20 bp, Artificial
  20-mer unique DNA sequence
tgctcaacagaccccccacg

SEQ ID NO: 5585 - DNA, 20 bp, Artificial
  20-mer unique DNA sequence
cgtcgcgcgtgtctctgtct

SEQ ID NO: 5586 - DNA, 20 bp, Artificial
  20-mer unique DNA sequence
ggtcccaattcctcacgccg

SEQ ID NO: 5587 - DNA, 20 bp, Artificial
  20-mer unique DNA sequence
ggttaaggagcgagggggcg

SEQ ID NO: 5588 - DNA, 20 bp, Artificial
  20-mer unique DNA sequence
acccatcccacgcaatcgaa

SEQ ID NO: 5589 - DNA, 20 bp, Artificial
  20-mer unique DNA sequence
cgcacatatcggtccccagg

SEQ ID NO: 5590 - DNA, 20 bp, Artificial
  20-mer unique DNA sequence
ccgggaatatgtagggccca

SEQ ID NO: 5591 - DNA, 20 bp, Artificial
  20-mer unique DNA sequence
agaagccgcgatcccacgtc

SEQ ID NO: 5592 - DNA, 20 bp, Artificial
  20-mer unique DNA sequence
ccgttctcccccgatcctct

SEQ ID NO: 5593 - DNA, 20 bp, Artificial
  20-mer unique DNA sequence
ccgcccgagcacgaataaac

SEQ ID NO: 5594 - DNA, 20 bp, Artificial
  20-mer unique DNA sequence
atcgcagtctagccttgcgg

SEQ ID NO: 5595 - DNA, 20 bp, Artificial
  20-mer unique DNA sequence
tggggtccaccggtatccaa

SEQ ID NO: 5596 - DNA, 20 bp, Artificial
  20-mer unique DNA sequence
caccccccaaaagaggcaga

SEQ ID NO: 5597 - DNA, 20 bp, Artificial
  20-mer unique DNA sequence
ggatagggaactcgggcggc

SEQ ID NO: 5598 - DNA, 20 bp, Artificial
  20-mer unique DNA sequence
cggaactgctgccccaccta

SEQ ID NO: 5599 - DNA, 20 bp, Artificial
  20-mer unique DNA sequence
cacgagcggagggaggaatc

SEQ ID NO: 5600 - DNA, 20 bp, Artificial
  20-mer unique DNA sequence
cagtatggcgaccagcctgt

SEQ ID NO: 5601 - DNA, 20 bp, Artificial
  20-mer unique DNA sequence
taactaaacgggcgctgcca

SEQ ID NO: 5602 - DNA, 20 bp, Artificial
  20-mer unique DNA sequence
ctcgcggccacaaaagctca

SEQ ID NO: 5603 - DNA, 20 bp, Artificial
  20-mer unique DNA sequence
gtttgagcgacggcaggtga

SEQ ID NO: 5604 - DNA, 20 bp, Artificial
  20-mer unique DNA sequence
gtgattttcggtgcgacgcc

SEQ ID NO: 5605 - DNA, 20 bp, Artificial
  20-mer unique DNA sequence
tacttggtctgccgcctggc

SEQ ID NO: 5606 - DNA, 20 bp, Artificial
  20-mer unique DNA sequence
actcccatccaaccgaccca

SEQ ID NO: 5607 - DNA, 20 bp, Artificial
  20-mer unique DNA sequence
atgatgtacccgcggccttc

SEQ ID NO: 5608 - DNA, 20 bp, Artificial
  20-mer unique DNA sequence
cgccggccttttcattggta

SEQ ID NO: 5609 - DNA, 20 bp, Artificial
  20-mer unique DNA sequence
tgaaccgcaccacccagcta

SEQ ID NO: 5610 - DNA, 20 bp, Artificial
  20-mer unique DNA sequence
cgaaaggtcaacggcagggc

SEQ ID NO: 5611 - DNA, 20 bp, Artificial
  20-mer unique DNA sequence
cctcaacaatatgccccccg

SEQ ID NO: 5612 - DNA, 20 bp, Artificial
  20-mer unique DNA sequence
aagccgcgggataagaagtg

SEQ ID NO: 5613 - DNA, 20 bp, Artificial
  20-mer unique DNA sequence
gcagccgcccaataacctcg

SEQ ID NO: 5614 - DNA, 20 bp, Artificial
  20-mer unique DNA sequence
cgcgcccgttgatggatgat

SEQ ID NO: 5615 - DNA, 20 bp, Artificial
  20-mer unique DNA sequence
cggtggtgctcctgttcgtg

SEQ ID NO: 5616 - DNA, 20 bp, Artificial
  20-mer unique DNA sequence
tcagcccccccagtgttgtc

SEQ ID NO: 5617 - DNA, 20 bp, Artificial
  20-mer unique DNA sequence
cgccttgagtcaccacccgt

SEQ ID NO: 5618 - DNA, 20 bp, Artificial
  20-mer unique DNA sequence
tgattcttctccgcaccgag

SEQ ID NO: 5619 - DNA, 20 bp, Artificial
  20-mer unique DNA sequence
acccagtaggctagagcggt

SEQ ID NO: 5620 - DNA, 20 bp, Artificial
  20-mer unique DNA sequence
ccttacgccaccgctcccta

SEQ ID NO: 5621 - DNA, 20 bp, Artificial
  20-mer unique DNA sequence
ttatgtggttcgcgcccgtc

SEQ ID NO: 5622 - DNA, 20 bp, Artificial
  20-mer unique DNA sequence
aagcacagggaagagccgca

SEQ ID NO: 5623 - DNA, 20 bp, Artificial
  20-mer unique DNA sequence
ttcggaggattgggctggac

SEQ ID NO: 5624 - DNA, 20 bp, Artificial
  20-mer unique DNA sequence
tcaagaggcgcgggatcact

SEQ ID NO: 5625 - DNA, 20 bp, Artificial
  20-mer unique DNA sequence
cccattggccgggtcgttaa

SEQ ID NO: 5626 - DNA, 20 bp, Artificial
  20-mer unique DNA sequence
cagtcggcaggtggtaggcc

SEQ ID NO: 5627 - DNA, 20 bp, Artificial
  20-mer unique DNA sequence
tcgttgctgtatccctcgcg

SEQ ID NO: 5628 - DNA, 20 bp, Artificial
  20-mer unique DNA sequence
ccgaatcagcccaaggccac

SEQ ID NO: 5629 - DNA, 20 bp, Artificial
  20-mer unique DNA sequence
ggcccggacaaaaaaggcag

SEQ ID NO: 5630 - DNA, 20 bp, Artificial
  20-mer unique DNA sequence
tgctggttgactccgtgggg

SEQ ID NO: 5631 - DNA, 20 bp, Artificial
  20-mer unique DNA sequence
gccgcccaataccgaagacg

SEQ ID NO: 5632 - DNA, 20 bp, Artificial
  20-mer unique DNA sequence
cgctgccgcatttgagaaag

SEQ ID NO: 5633 - DNA, 20 bp, Artificial
  20-mer unique DNA sequence
ccgtttcactcgcatcgcat

SEQ ID NO: 5634 - DNA, 20 bp, Artificial
  20-mer unique DNA sequence
gacgcacactcctcccccat

SEQ ID NO: 5635 - DNA, 20 bp, Artificial
  20-mer unique DNA sequence
cgcaccacactagcccccac

SEQ ID NO: 5636 - DNA, 20 bp, Artificial
  20-mer unique DNA sequence
tgttctcccccccagccagc

SEQ ID NO: 5637 - DNA, 20 bp, Artificial
  20-mer unique DNA sequence
aatggacggggcaacacagg

SEQ ID NO: 5638 - DNA, 20 bp, Artificial
  20-mer unique DNA sequence
tcgggggatagcggtttgga

SEQ ID NO: 5639 - DNA, 20 bp, Artificial
  20-mer unique DNA sequence
tctggtgccggggatgaaca

SEQ ID NO: 5640 - DNA, 20 bp, Artificial
  20-mer unique DNA sequence
ccgatgggggcaacctgttt

SEQ ID NO: 5641 - DNA, 20 bp, Artificial
  20-mer unique DNA sequence
tcccgcattcagagcccatt

SEQ ID NO: 5642 - DNA, 20 bp, Artificial
  20-mer unique DNA sequence
agaaacatccgggcgcacaa

SEQ ID NO: 5643 - DNA, 20 bp, Artificial
  20-mer unique DNA sequence
ttcggagacttcggggggtc

SEQ ID NO: 5644 - DNA, 20 bp, Artificial
  20-mer unique DNA sequence
ccccttccacgtgctttgcg

SEQ ID NO: 5645 - DNA, 20 bp, Artificial
  20-mer unique DNA sequence
cgcgattgggcctgtttgct

SEQ ID NO: 5646 - DNA, 20 bp, Artificial
  20-mer unique DNA sequence
tgaccttctttttggcggcg

SEQ ID NO: 5647 - DNA, 20 bp, Artificial
  20-mer unique DNA sequence
atcgtcaacccgccaaaacg

SEQ ID NO: 5648 - DNA, 20 bp, Artificial
  20-mer unique DNA sequence
ttcagccccgatccagagcc

SEQ ID NO: 5649 - DNA, 20 bp, Artificial
  20-mer unique DNA sequence
cgagaaaggaaccgccgatg

SEQ ID NO: 5650 - DNA, 20 bp, Artificial
  20-mer unique DNA sequence
ctgctccgccgttatccacc

SEQ ID NO: 5651 - DNA, 20 bp, Artificial
  20-mer unique DNA sequence
ctgaagaccctgcgcgtggg

SEQ ID NO: 5652 - DNA, 20 bp, Artificial
  20-mer unique DNA sequence
cctttcagggacgggaccgg

SEQ ID NO: 5653 - DNA, 20 bp, Artificial
  20-mer unique DNA sequence
atatcggccaccccctgctc

SEQ ID NO: 5654 - DNA, 20 bp, Artificial
  20-mer unique DNA sequence
gggtaaatgggaccgtgcgg

SEQ ID NO: 5655 - DNA, 20 bp, Artificial
  20-mer unique DNA sequence
tacgtgtccgccccacctcc

SEQ ID NO: 5656 - DNA, 20 bp, Artificial
  20-mer unique DNA sequence
agccctgccaacctacgtcg

SEQ ID NO: 5657 - DNA, 20 bp, Artificial
  20-mer unique DNA sequence
gtagtgcgggaaaagggggc

SEQ ID NO: 5658 - DNA, 20 bp, Artificial
  20-mer unique DNA sequence
ccttacaacaaccgcccccc

SEQ ID NO: 5659 - DNA, 20 bp, Artificial
  20-mer unique DNA sequence
aaccccgtcccgtcttcgct

SEQ ID NO: 5660 - DNA, 20 bp, Artificial
  20-mer unique DNA sequence
ccgttattgtggtgcgcggg

SEQ ID NO: 5661 - DNA, 20 bp, Artificial
  20-mer unique DNA sequence
accaccccttaaacggccgc

SEQ ID NO: 5662 - DNA, 20 bp, Artificial
  20-mer unique DNA sequence
ctacccatcccctgccgtcg

SEQ ID NO: 5663 - DNA, 20 bp, Artificial
  20-mer unique DNA sequence
ccggaagggcgcacgattat

SEQ ID NO: 5664 - DNA, 20 bp, Artificial
  20-mer unique DNA sequence
ctcgggaaacggggcttgat

SEQ ID NO: 5665 - DNA, 20 bp, Artificial
  20-mer unique DNA sequence
cgtaggaacagtggcgcgag

SEQ ID NO: 5666 - DNA, 20 bp, Artificial
  20-mer unique DNA sequence
agtcaaaagggcgcgagtcc

SEQ ID NO: 5667 - DNA, 20 bp, Artificial
  20-mer unique DNA sequence
cgccaatgtcaaccccggag

SEQ ID NO: 5668 - DNA, 20 bp, Artificial
  20-mer unique DNA sequence
aagtgacccgcagtcgcaca

SEQ ID NO: 5669 - DNA, 20 bp, Artificial
  20-mer unique DNA sequence
acacagggctagtccgcagt

SEQ ID NO: 5670 - DNA, 20 bp, Artificial
  20-mer unique DNA sequence
aaaaaaactggtcgggggcg

SEQ ID NO: 5671 - DNA, 20 bp, Artificial
  20-mer unique DNA sequence
gcccacgcgaccatgcatct

SEQ ID NO: 5672 - DNA, 20 bp, Artificial
  20-mer unique DNA sequence
gatgcgtttttggggcgaag

SEQ ID NO: 5673 - DNA, 20 bp, Artificial
  20-mer unique DNA sequence
cccccttttctgtggtcgca

SEQ ID NO: 5674 - DNA, 20 bp, Artificial
  20-mer unique DNA sequence
cccacacttaacgccgcagc

SEQ ID NO: 5675 - DNA, 20 bp, Artificial
  20-mer unique DNA sequence
catgccaatccagccccacg

SEQ ID NO: 5676 - DNA, 20 bp, Artificial
  20-mer unique DNA sequence
gcgtctttgtcgccatgggc

SEQ ID NO: 5677 - DNA, 20 bp, Artificial
  20-mer unique DNA sequence
gcaaaggcgacaaggaccgt

SEQ ID NO: 5678 - DNA, 20 bp, Artificial
  20-mer unique DNA sequence
gcttcttgggtggcattcgg

SEQ ID NO: 5679 - DNA, 20 bp, Artificial
  20-mer unique DNA sequence
ctcccgaacaggcaaaccgc

SEQ ID NO: 5680 - DNA, 20 bp, Artificial
  20-mer unique DNA sequence
tgctgctttcggttccctca

SEQ ID NO: 5681 - DNA, 20 bp, Artificial
  20-mer unique DNA sequence
aaggcaccccacccagcatc

SEQ ID NO: 5682 - DNA, 20 bp, Artificial
  20-mer unique DNA sequence
cacccaagccctccctccac

SEQ ID NO: 5683 - DNA, 20 bp, Artificial
  20-mer unique DNA sequence
catagcgcgcgggaatctca

SEQ ID NO: 5684 - DNA, 20 bp, Artificial
  20-mer unique DNA sequence
gcaaggagcggaaggctggg

SEQ ID NO: 5685 - DNA, 20 bp, Artificial
  20-mer unique DNA sequence
gggaggggtttctggcggag

SEQ ID NO: 5686 - DNA, 20 bp, Artificial
  20-mer unique DNA sequence
tgacgaattttgaacccgcg

SEQ ID NO: 5687 - DNA, 20 bp, Artificial
  20-mer unique DNA sequence
ccgaggttgtatgggagcgc

SEQ ID NO: 5688 - DNA, 20 bp, Artificial
  20-mer unique DNA sequence
tgacgcgccagccttacttg

SEQ ID NO: 5689 - DNA, 20 bp, Artificial
  20-mer unique DNA sequence
ttttggggttggcggtggac

SEQ ID NO: 5690 - DNA, 20 bp, Artificial
  20-mer unique DNA sequence
tgggtttctagccgagcgac

SEQ ID NO: 5691 - DNA, 20 bp, Artificial
  20-mer unique DNA sequence
atccctgacaggcccttgtg

SEQ ID NO: 5692 - DNA, 20 bp, Artificial
  20-mer unique DNA sequence
agagcggcgacgaggagagg

SEQ ID NO: 5693 - DNA, 20 bp, Artificial
  20-mer unique DNA sequence
tcgccctgacgcctaccatt

SEQ ID NO: 5694 - DNA, 20 bp, Artificial
  20-mer unique DNA sequence
ggccgatgcctaatgcttgc

SEQ ID NO: 5695 - DNA, 20 bp, Artificial
  20-mer unique DNA sequence
ggttccagggtgggcgctta

SEQ ID NO: 5696 - DNA, 20 bp, Artificial
  20-mer unique DNA sequence
caccgcatcacccaccgtct

SEQ ID NO: 5697 - DNA, 20 bp, Artificial
  20-mer unique DNA sequence
caattgcatccacaggccgt

SEQ ID NO: 5698 - DNA, 20 bp, Artificial
  20-mer unique DNA sequence
tgggtgcggattctagggcc

SEQ ID NO: 5699 - DNA, 20 bp, Artificial
  20-mer unique DNA sequence
agacgggggagtaggcggtt

SEQ ID NO: 5700 - DNA, 20 bp, Artificial
  20-mer unique DNA sequence
tcttgttgtggtgcggggca

SEQ ID NO: 5701 - DNA, 20 bp, Artificial
  20-mer unique DNA sequence
atggggggctcagggagagg

SEQ ID NO: 5702 - DNA, 20 bp, Artificial
  20-mer unique DNA sequence
accgcgaccttcaccaccga

SEQ ID NO: 5703 - DNA, 20 bp, Artificial
  20-mer unique DNA sequence
caaccgcgcaaggagcatca

SEQ ID NO: 5704 - DNA, 20 bp, Artificial
  20-mer unique DNA sequence
cctgtgtctgggcacctgcg

SEQ ID NO: 5705 - DNA, 20 bp, Artificial
  20-mer unique DNA sequence
ggggcttggggtacgtgagg

SEQ ID NO: 5706 - DNA, 20 bp, Artificial
  20-mer unique DNA sequence
ccccctgtggatgtttggcc

SEQ ID NO: 5707 - DNA, 20 bp, Artificial
  20-mer unique DNA sequence
tggcgggtaggtcgaggaac

SEQ ID NO: 5708 - DNA, 20 bp, Artificial
  20-mer unique DNA sequence
gccttgggtggtgccgttat

SEQ ID NO: 5709 - DNA, 20 bp, Artificial
  20-mer unique DNA sequence
caggggtacgggacgggaat

SEQ ID NO: 5710 - DNA, 20 bp, Artificial
  20-mer unique DNA sequence
cccaaggttcgcactcggtc

SEQ ID NO: 5711 - DNA, 20 bp, Artificial
  20-mer unique DNA sequence
ttgggccgccggtgtaaatc

SEQ ID NO: 5712 - DNA, 20 bp, Artificial
  20-mer unique DNA sequence
ttgcttgcgcggacttttcg

SEQ ID NO: 5713 - DNA, 20 bp, Artificial
  20-mer unique DNA sequence
aggatgtgcgcttccggctg

SEQ ID NO: 5714 - DNA, 20 bp, Artificial
  20-mer unique DNA sequence
accactttgttccgccaccc

SEQ ID NO: 5715 - DNA, 20 bp, Artificial
  20-mer unique DNA sequence
gagacccctatgcgcaccga

SEQ ID NO: 5716 - DNA, 20 bp, Artificial
  20-mer unique DNA sequence
ggttgtggggcaggcagtcg

SEQ ID NO: 5717 - DNA, 20 bp, Artificial
  20-mer unique DNA sequence
tgggagggagcgaaagccta

SEQ ID NO: 5718 - DNA, 20 bp, Artificial
  20-mer unique DNA sequence
aaggattgtgtttgccccgc

SEQ ID NO: 5719 - DNA, 20 bp, Artificial
  20-mer unique DNA sequence
ctccgccgccgactcatctc

SEQ ID NO: 5720 - DNA, 20 bp, Artificial
  20-mer unique DNA sequence
gttgtccaaggcccgtcccc

SEQ ID NO: 5721 - DNA, 20 bp, Artificial
  20-mer unique DNA sequence
tggttgtgtgagtgcgcggc

SEQ ID NO: 5722 - DNA, 20 bp, Artificial
  20-mer unique DNA sequence
tcactccgccctcgcctctt

SEQ ID NO: 5723 - DNA, 20 bp, Artificial
  20-mer unique DNA sequence
ccaatgagggagggagcgaa

SEQ ID NO: 5724 - DNA, 20 bp, Artificial
  20-mer unique DNA sequence
ggggtcctagttcgcgcgag

SEQ ID NO: 5725 - DNA, 20 bp, Artificial
  20-mer unique DNA sequence
tgcacccacaccacacaccc

SEQ ID NO: 5726 - DNA, 20 bp, Artificial
  20-mer unique DNA sequence
acagccatgagccgaccctc

SEQ ID NO: 5727 - DNA, 20 bp, Artificial
  20-mer unique DNA sequence
tttaggcattccgggacggg

SEQ ID NO: 5728 - DNA, 20 bp, Artificial
  20-mer unique DNA sequence
atcggacgtgggctgcttgc

SEQ ID NO: 5729 - DNA, 20 bp, Artificial
  20-mer unique DNA sequence
agtaaaggcgtaggcccggg

SEQ ID NO: 5730 - DNA, 20 bp, Artificial
  20-mer unique DNA sequence
tgccttgtagctccgcgcgt

SEQ ID NO: 5731 - DNA, 20 bp, Artificial
  20-mer unique DNA sequence
cgtgttcgggtggcccttag

SEQ ID NO: 5732 - DNA, 20 bp, Artificial
  20-mer unique DNA sequence
aagccaaatgcgatcccacc

SEQ ID NO: 5733 - DNA, 20 bp, Artificial
  20-mer unique DNA sequence
gggcgaaagaacgtagggcg

SEQ ID NO: 5734 - DNA, 20 bp, Artificial
  20-mer unique DNA sequence
acccacatcaccctcttcgg

SEQ ID NO: 5735 - DNA, 20 bp, Artificial
  20-mer unique DNA sequence
caagcctcacccgcctatcc

SEQ ID NO: 5736 - DNA, 20 bp, Artificial
  20-mer unique DNA sequence
ctatgagaaggtcggggcgg

SEQ ID NO: 5737 - DNA, 20 bp, Artificial
  20-mer unique DNA sequence
cccgcaacaaacccatccct

SEQ ID NO: 5738 - DNA, 20 bp, Artificial
  20-mer unique DNA sequence
ttaactatcgggcaggcggg

SEQ ID NO: 5739 - DNA, 20 bp, Artificial
  20-mer unique DNA sequence
aagcgcgtgttgatggatgg

SEQ ID NO: 5740 - DNA, 20 bp, Artificial
  20-mer unique DNA sequence
ttggcgataaccacaccgga

SEQ ID NO: 5741 - DNA, 20 bp, Artificial
  20-mer unique DNA sequence
gctagtctccctggcgccac

SEQ ID NO: 5742 - DNA, 20 bp, Artificial
  20-mer unique DNA sequence
gccgcgcattaccaacatag

SEQ ID NO: 5743 - DNA, 20 bp, Artificial
  20-mer unique DNA sequence
tgcgcgtacagggctaacaa

SEQ ID NO: 5744 - DNA, 20 bp, Artificial
  20-mer unique DNA sequence
ctccccggtcaagctgcaga

SEQ ID NO: 5745 - DNA, 20 bp, Artificial
  20-mer unique DNA sequence
tatcttcgcccacccacgcc

SEQ ID NO: 5746 - DNA, 20 bp, Artificial
  20-mer unique DNA sequence
tagatcatgcgcacgcggta

SEQ ID NO: 5747 - DNA, 20 bp, Artificial
  20-mer unique DNA sequence
tgcttcagtcagcccagtgt

SEQ ID NO: 5748 - DNA, 20 bp, Artificial
  20-mer unique DNA sequence
ttagtttatgcgtggcggcg

SEQ ID NO: 5749 - DNA, 20 bp, Artificial
  20-mer unique DNA sequence
ggagggaggcggcggagtta

SEQ ID NO: 5750 - DNA, 20 bp, Artificial
  20-mer unique DNA sequence
tacccccccttttacccccg

SEQ ID NO: 5751 - DNA, 20 bp, Artificial
  20-mer unique DNA sequence
tgtccctcctgcccgttttt

SEQ ID NO: 5752 - DNA, 20 bp, Artificial
  20-mer unique DNA sequence
aatcatcgaacggcacgcgt

SEQ ID NO: 5753 - DNA, 20 bp, Artificial
  20-mer unique DNA sequence
tgcgcatctccggttgctag

SEQ ID NO: 5754 - DNA, 20 bp, Artificial
  20-mer unique DNA sequence
gcgcatctacgggggaacca

SEQ ID NO: 5755 - DNA, 20 bp, Artificial
  20-mer unique DNA sequence
cctggggggggaaaatgttg

SEQ ID NO: 5756 - DNA, 20 bp, Artificial
  20-mer unique DNA sequence
ccgtatgggtggttggccga

SEQ ID NO: 5757 - DNA, 20 bp, Artificial
  20-mer unique DNA sequence
ttcgatgtagcggcgttggc

SEQ ID NO: 5758 - DNA, 20 bp, Artificial
  20-mer unique DNA sequence
gtaaacgccggctgcatccg

SEQ ID NO: 5759 - DNA, 20 bp, Artificial
  20-mer unique DNA sequence
acgtgatctgcattggccca

SEQ ID NO: 5760 - DNA, 20 bp, Artificial
  20-mer unique DNA sequence
cctcctccgccccgacaatc

SEQ ID NO: 5761 - DNA, 20 bp, Artificial
  20-mer unique DNA sequence
acaccccccctcccctttgg

SEQ ID NO: 5762 - DNA, 20 bp, Artificial
  20-mer unique DNA sequence
ttgccccgtgtcttcccctt

SEQ ID NO: 5763 - DNA, 20 bp, Artificial
  20-mer unique DNA sequence
cacgctcccgtctcttccca

SEQ ID NO: 5764 - DNA, 20 bp, Artificial
  20-mer unique DNA sequence
ggcggggaagtttgagcgat

SEQ ID NO: 5765 - DNA, 20 bp, Artificial
  20-mer unique DNA sequence
cgcgtgttcattctctcggg

SEQ ID NO: 5766 - DNA, 20 bp, Artificial
  20-mer unique DNA sequence
cccgaacaccacacgcactg

SEQ ID NO: 5767 - DNA, 20 bp, Artificial
  20-mer unique DNA sequence
cgctcgctcgtcgtccttct

SEQ ID NO: 5768 - DNA, 20 bp, Artificial
  20-mer unique DNA sequence
ggttctggtgggtacggggc

SEQ ID NO: 5769 - DNA, 20 bp, Artificial
  20-mer unique DNA sequence
gccgcggaggaagaagcatc

SEQ ID NO: 5770 - DNA, 20 bp, Artificial
  20-mer unique DNA sequence
acacgcgattttggcaccca

SEQ ID NO: 5771 - DNA, 20 bp, Artificial
  20-mer unique DNA sequence
cggtcgtcccatttacggct

SEQ ID NO: 5772 - DNA, 20 bp, Artificial
  20-mer unique DNA sequence
tccaccttccgtcctgcccc

SEQ ID NO: 5773 - DNA, 20 bp, Artificial
  20-mer unique DNA sequence
catattgcggccggcttaca

SEQ ID NO: 5774 - DNA, 20 bp, Artificial
  20-mer unique DNA sequence
ctgcgggatctgctacgtga

SEQ ID NO: 5775 - DNA, 20 bp, Artificial
  20-mer unique DNA sequence
tggcagttgggttcgtggga

SEQ ID NO: 5776 - DNA, 20 bp, Artificial
  20-mer unique DNA sequence
accctttcccctcccgacgc

SEQ ID NO: 5777 - DNA, 20 bp, Artificial
  20-mer unique DNA sequence
ctggtggctcgcgttactgg

SEQ ID NO: 5778 - DNA, 20 bp, Artificial
  20-mer unique DNA sequence
acgccccttcattaccgctg

SEQ ID NO: 5779 - DNA, 20 bp, Artificial
  20-mer unique DNA sequence
aaagcttcgatctgcgcccc

SEQ ID NO: 5780 - DNA, 20 bp, Artificial
  20-mer unique DNA sequence
ttctgagcccctctccctcg

SEQ ID NO: 5781 - DNA, 20 bp, Artificial
  20-mer unique DNA sequence
catacgacgcacaccccagc

SEQ ID NO: 5782 - DNA, 20 bp, Artificial
  20-mer unique DNA sequence
agggccgaccacacactggc

SEQ ID NO: 5783 - DNA, 20 bp, Artificial
  20-mer unique DNA sequence
gcgatgcgattttggatggg

SEQ ID NO: 5784 - DNA, 20 bp, Artificial
  20-mer unique DNA sequence
agccacctcctgcctcccac

SEQ ID NO: 5785 - DNA, 20 bp, Artificial
  20-mer unique DNA sequence
cggaagcagaaccaagccgc

SEQ ID NO: 5786 - DNA, 20 bp, Artificial
  20-mer unique DNA sequence
agccctcccctgtccccctc

SEQ ID NO: 5787 - DNA, 20 bp, Artificial
  20-mer unique DNA sequence
atctgccttcgcttgccgct

SEQ ID NO: 5788 - DNA, 20 bp, Artificial
  20-mer unique DNA sequence
tcaggcactaacccacccgc

SEQ ID NO: 5789 - DNA, 20 bp, Artificial
  20-mer unique DNA sequence
tttcggcttcgggtggttgc

SEQ ID NO: 5790 - DNA, 20 bp, Artificial
  20-mer unique DNA sequence
gcccaccctcgcataacgat

SEQ ID NO: 5791 - DNA, 20 bp, Artificial
  20-mer unique DNA sequence
cgacctcatgcggcacaatc

SEQ ID NO: 5792 - DNA, 20 bp, Artificial
  20-mer unique DNA sequence
cagcccagatgatgccgaga

SEQ ID NO: 5793 - DNA, 20 bp, Artificial
  20-mer unique DNA sequence
tgccattccgctgccctatt

SEQ ID NO: 5794 - DNA, 20 bp, Artificial
  20-mer unique DNA sequence
agaacggaggggatggcagc

SEQ ID NO: 5795 - DNA, 20 bp, Artificial
  20-mer unique DNA sequence
cggatttctcccccgccaga

SEQ ID NO: 5796 - DNA, 20 bp, Artificial
  20-mer unique DNA sequence
attgggtagggggtcggata

SEQ ID NO: 5797 - DNA, 20 bp, Artificial
  20-mer unique DNA sequence
ccgcggggttgaggaatcgt

SEQ ID NO: 5798 - DNA, 20 bp, Artificial
  20-mer unique DNA sequence
agatgacctgcccaaccgcc

SEQ ID NO: 5799 - DNA, 20 bp, Artificial
  20-mer unique DNA sequence
atcgccttaacgccactgcc

SEQ ID NO: 5800 - DNA, 20 bp, Artificial
  20-mer unique DNA sequence
cgctcatcttgccccccatt

SEQ ID NO: 5801 - DNA, 20 bp, Artificial
  20-mer unique DNA sequence
cgttaaccgagggggcatgc

SEQ ID NO: 5802 - DNA, 20 bp, Artificial
  20-mer unique DNA sequence
tccgcccgagttccttttca

SEQ ID NO: 5803 - DNA, 20 bp, Artificial
  20-mer unique DNA sequence
ctccgccctcttctcgtccg

SEQ ID NO: 5804 - DNA, 20 bp, Artificial
  20-mer unique DNA sequence
ataattcgcccaacgggtgg

SEQ ID NO: 5805 - DNA, 20 bp, Artificial
  20-mer unique DNA sequence
attgttgagcgagcgggtgc

SEQ ID NO: 5806 - DNA, 20 bp, Artificial
  20-mer unique DNA sequence
ttctccgaatacccgcctcc

SEQ ID NO: 5807 - DNA, 20 bp, Artificial
  20-mer unique DNA sequence
aatcggtgcgggtgtgggag

SEQ ID NO: 5808 - DNA, 20 bp, Artificial
  20-mer unique DNA sequence
aattcgcaaaggtccagccg

SEQ ID NO: 5809 - DNA, 20 bp, Artificial
  20-mer unique DNA sequence
acatcggggcgtaagggcat

SEQ ID NO: 5810 - DNA, 20 bp, Artificial
  20-mer unique DNA sequence
tgccacggatccaagaagca

SEQ ID NO: 5811 - DNA, 20 bp, Artificial
  20-mer unique DNA sequence
gtgccggggatttccgaagg

SEQ ID NO: 5812 - DNA, 20 bp, Artificial
  20-mer unique DNA sequence
tgcgaatctggggtcaccgg

SEQ ID NO: 5813 - DNA, 20 bp, Artificial
  20-mer unique DNA sequence
ggttcttgggccgcttatgc

SEQ ID NO: 5814 - DNA, 20 bp, Artificial
  20-mer unique DNA sequence
ctatcgttgggtcgctggcg

SEQ ID NO: 5815 - DNA, 20 bp, Artificial
  20-mer unique DNA sequence
tcccccgccttttattcgct

SEQ ID NO: 5816 - DNA, 20 bp, Artificial
  20-mer unique DNA sequence
gccttgaggagcacgctggt

SEQ ID NO: 5817 - DNA, 20 bp, Artificial
  20-mer unique DNA sequence
cactcacgacggccgaaagg

SEQ ID NO: 5818 - DNA, 20 bp, Artificial
  20-mer unique DNA sequence
ggtaggcggtgcggagaggg

SEQ ID NO: 5819 - DNA, 20 bp, Artificial
  20-mer unique DNA sequence
ataagcccgcacacagccgc

SEQ ID NO: 5820 - DNA, 20 bp, Artificial
  20-mer unique DNA sequence
cacgctcgcctcctttccag

SEQ ID NO: 5821 - DNA, 20 bp, Artificial
  20-mer unique DNA sequence
tcgcctgtcggtttctcgcg

SEQ ID NO: 5822 - DNA, 20 bp, Artificial
  20-mer unique DNA sequence
ggcccccggtattgagtgtg

SEQ ID NO: 5823 - DNA, 20 bp, Artificial
  20-mer unique DNA sequence
cagctgttcttgcggatggg

SEQ ID NO: 5824 - DNA, 20 bp, Artificial
  20-mer unique DNA sequence
tcaggcttcaggcgtcacgt

SEQ ID NO: 5825 - DNA, 20 bp, Artificial
  20-mer unique DNA sequence
tgggcgcaagcacggaatac

SEQ ID NO: 5826 - DNA, 20 bp, Artificial
  20-mer unique DNA sequence
gcactttccggagcgtcaca

SEQ ID NO: 5827 - DNA, 20 bp, Artificial
  20-mer unique DNA sequence
tgcaagccatacaccgacgc

SEQ ID NO: 5828 - DNA, 20 bp, Artificial
  20-mer unique DNA sequence
gtgcatggcctggagcgtgg

SEQ ID NO: 5829 - DNA, 20 bp, Artificial
  20-mer unique DNA sequence
ttcggttaagccacaggcgc

SEQ ID NO: 5830 - DNA, 20 bp, Artificial
  20-mer unique DNA sequence
gccccagccgatacctaccc

SEQ ID NO: 5831 - DNA, 20 bp, Artificial
  20-mer unique DNA sequence
ccataaggaaacggggcgaa

SEQ ID NO: 5832 - DNA, 20 bp, Artificial
  20-mer unique DNA sequence
ccgccaagccacgtatctcc

SEQ ID NO: 5833 - DNA, 20 bp, Artificial
  20-mer unique DNA sequence
ctagcgcaggccccattcat

SEQ ID NO: 5834 - DNA, 20 bp, Artificial
  20-mer unique DNA sequence
tgcctgcgagtgtggttcct

SEQ ID NO: 5835 - DNA, 20 bp, Artificial
  20-mer unique DNA sequence
tataaccgtccccccccatg

SEQ ID NO: 5836 - DNA, 20 bp, Artificial
  20-mer unique DNA sequence
gaacccatcggcaaccccac

SEQ ID NO: 5837 - DNA, 20 bp, Artificial
  20-mer unique DNA sequence
gtcccgccgctcccgaacta

SEQ ID NO: 5838 - DNA, 20 bp, Artificial
  20-mer unique DNA sequence
agcccagttaccgcccacgc

SEQ ID NO: 5839 - DNA, 20 bp, Artificial
  20-mer unique DNA sequence
tgacccgcctttcagtgtgc

SEQ ID NO: 5840 - DNA, 20 bp, Artificial
  20-mer unique DNA sequence
aggcaacaagtgggtggggc

SEQ ID NO: 5841 - DNA, 20 bp, Artificial
  20-mer unique DNA sequence
gcagccaacaaccagccctc

SEQ ID NO: 5842 - DNA, 20 bp, Artificial
  20-mer unique DNA sequence
agggacaactgcatggcggg

SEQ ID NO: 5843 - DNA, 20 bp, Artificial
  20-mer unique DNA sequence
gagcgctgccaaagggaaag

SEQ ID NO: 5844 - DNA, 20 bp, Artificial
  20-mer unique DNA sequence
ccgactccatgaaaaggccg

SEQ ID NO: 5845 - DNA, 20 bp, Artificial
  20-mer unique DNA sequence
gcctctcccgacattcctgc

SEQ ID NO: 5846 - DNA, 20 bp, Artificial
  20-mer unique DNA sequence
tttttactgggcggcggtgg

SEQ ID NO: 5847 - DNA, 20 bp, Artificial
  20-mer unique DNA sequence
ttcagccatggtttcggggt

SEQ ID NO: 5848 - DNA, 20 bp, Artificial
  20-mer unique DNA sequence
taaatgatggcgccgtggtc

SEQ ID NO: 5849 - DNA, 20 bp, Artificial
  20-mer unique DNA sequence
agggtgcggaatgtggggag

SEQ ID NO: 5850 - DNA, 20 bp, Artificial
  20-mer unique DNA sequence
tactcctgcggctttgggcg

SEQ ID NO: 5851 - DNA, 20 bp, Artificial
  20-mer unique DNA sequence
taatgccaaagcccgccgaa

SEQ ID NO: 5852 - DNA, 20 bp, Artificial
  20-mer unique DNA sequence
ctcggcgttgcccacattca

SEQ ID NO: 5853 - DNA, 20 bp, Artificial
  20-mer unique DNA sequence
cgcattcgccagcaggtctg

SEQ ID NO: 5854 - DNA, 20 bp, Artificial
  20-mer unique DNA sequence
catcactccaacaccgcgcc

SEQ ID NO: 5855 - DNA, 20 bp, Artificial
  20-mer unique DNA sequence
tggaacggggtgcaatctcg

SEQ ID NO: 5856 - DNA, 20 bp, Artificial
  20-mer unique DNA sequence
tagcagacgcccagaacgcc

SEQ ID NO: 5857 - DNA, 20 bp, Artificial
  20-mer unique DNA sequence
aaacgagccgccaccctggt

SEQ ID NO: 5858 - DNA, 20 bp, Artificial
  20-mer unique DNA sequence
attccagccacctcccccca

SEQ ID NO: 5859 - DNA, 20 bp, Artificial
  20-mer unique DNA sequence
ggctcgggcagagggtaggc

SEQ ID NO: 5860 - DNA, 20 bp, Artificial
  20-mer unique DNA sequence
tacagcgctccggattccct

SEQ ID NO: 5861 - DNA, 20 bp, Artificial
  20-mer unique DNA sequence
tccgcccgctcataatcccc

SEQ ID NO: 5862 - DNA, 20 bp, Artificial
  20-mer unique DNA sequence
agcggggggcttttatgttg

SEQ ID NO: 5863 - DNA, 20 bp, Artificial
  20-mer unique DNA sequence
atgggcgagacgaggacggt

SEQ ID NO: 5864 - DNA, 20 bp, Artificial
  20-mer unique DNA sequence
aggccctaagcaccggaacg

SEQ ID NO: 5865 - DNA, 20 bp, Artificial
  20-mer unique DNA sequence
cctgctcatgccccaaatca

SEQ ID NO: 5866 - DNA, 20 bp, Artificial
  20-mer unique DNA sequence
cccgtatgcccaccgcctct

SEQ ID NO: 5867 - DNA, 20 bp, Artificial
  20-mer unique DNA sequence
gcaagaagacgcggcaatcc

SEQ ID NO: 5868 - DNA, 20 bp, Artificial
  20-mer unique DNA sequence
cgggtgagggtgaaagcgag

SEQ ID NO: 5869 - DNA, 20 bp, Artificial
  20-mer unique DNA sequence
actgtttggctgcgtgtcga

SEQ ID NO: 5870 - DNA, 20 bp, Artificial
  20-mer unique DNA sequence
ggccccacttcaccatcgca

SEQ ID NO: 5871 - DNA, 20 bp, Artificial
  20-mer unique DNA sequence
gcgactagcggtgccagatt

SEQ ID NO: 5872 - DNA, 20 bp, Artificial
  20-mer unique DNA sequence
gtcaccgcggcttcccaatt

SEQ ID NO: 5873 - DNA, 20 bp, Artificial
  20-mer unique DNA sequence
atccgggcacgcaaaggtac

SEQ ID NO: 5874 - DNA, 20 bp, Artificial
  20-mer unique DNA sequence
ggctgatatgctccgctgca

SEQ ID NO: 5875 - DNA, 20 bp, Artificial
  20-mer unique DNA sequence
acgagacgacaaccctgccc

SEQ ID NO: 5876 - DNA, 20 bp, Artificial
  20-mer unique DNA sequence
gttgaacgcggggtgaaagc

SEQ ID NO: 5877 - DNA, 20 bp, Artificial
  20-mer unique DNA sequence
tcggcttgagggtgcgtcta

SEQ ID NO: 5878 - DNA, 20 bp, Artificial
  20-mer unique DNA sequence
cgcggacctcatgaattggc

SEQ ID NO: 5879 - DNA, 20 bp, Artificial
  20-mer unique DNA sequence
cttggaggttggcccgctga

SEQ ID NO: 5880 - DNA, 20 bp, Artificial
  20-mer unique DNA sequence
cataaaacatcccgggcgcg

SEQ ID NO: 5881 - DNA, 20 bp, Artificial
  20-mer unique DNA sequence
cgatgcacgaaaccccgaga

SEQ ID NO: 5882 - DNA, 20 bp, Artificial
  20-mer unique DNA sequence
ccaaacggcaaggggaacga

SEQ ID NO: 5883 - DNA, 20 bp, Artificial
  20-mer unique DNA sequence
gtggtggcgaagggaagggt

SEQ ID NO: 5884 - DNA, 20 bp, Artificial
  20-mer unique DNA sequence
ctacggcgaccaacgggacg

SEQ ID NO: 5885 - DNA, 20 bp, Artificial
  20-mer unique DNA sequence
agacccggcattccagcagg

SEQ ID NO: 5886 - DNA, 20 bp, Artificial
  20-mer unique DNA sequence
ggccttcgctctgccttgca

SEQ ID NO: 5887 - DNA, 20 bp, Artificial
  20-mer unique DNA sequence
aattgaactgagccgcgcgc

SEQ ID NO: 5888 - DNA, 20 bp, Artificial
  20-mer unique DNA sequence
gaaaggcccgaacgcgaatt

SEQ ID NO: 5889 - DNA, 20 bp, Artificial
  20-mer unique DNA sequence
ccccctgcggcaatcaaatg

SEQ ID NO: 5890 - DNA, 20 bp, Artificial
  20-mer unique DNA sequence
tgcgtgggtggggaaaacag

SEQ ID NO: 5891 - DNA, 20 bp, Artificial
  20-mer unique DNA sequence
ccccaaacctagcgccaacc

SEQ ID NO: 5892 - DNA, 20 bp, Artificial
  20-mer unique DNA sequence
acgcttacccgcccgatgtg

SEQ ID NO: 5893 - DNA, 20 bp, Artificial
  20-mer unique DNA sequence
gccgccaacctagcaaaccc

SEQ ID NO: 5894 - DNA, 20 bp, Artificial
  20-mer unique DNA sequence
ggacacggaagggcgagaaa

SEQ ID NO: 5895 - DNA, 20 bp, Artificial
  20-mer unique DNA sequence
ccgttccttgccacccattt

SEQ ID NO: 5896 - DNA, 20 bp, Artificial
  20-mer unique DNA sequence
ccaagtgcgcgagtacaggg

SEQ ID NO: 5897 - DNA, 20 bp, Artificial
  20-mer unique DNA sequence
cccgtcgcctcgcagacatc

SEQ ID NO: 5898 - DNA, 20 bp, Artificial
  20-mer unique DNA sequence
agccattcacacgcggtcag

SEQ ID NO: 5899 - DNA, 20 bp, Artificial
  20-mer unique DNA sequence
gtcgtatttggcgccgtggg

SEQ ID NO: 5900 - DNA, 20 bp, Artificial
  20-mer unique DNA sequence
gtagagcgtggggcgaatgg

SEQ ID NO: 5901 - DNA, 20 bp, Artificial
  20-mer unique DNA sequence
acaatgaacgccagggggaa

SEQ ID NO: 5902 - DNA, 20 bp, Artificial
  20-mer unique DNA sequence
tcgtttctgggcgtgctggt

SEQ ID NO: 5903 - DNA, 20 bp, Artificial
  20-mer unique DNA sequence
agcgaacgagaaccccaccg

SEQ ID NO: 5904 - DNA, 20 bp, Artificial
  20-mer unique DNA sequence
ttacaacgcatgggacgggg

SEQ ID NO: 5905 - DNA, 20 bp, Artificial
  20-mer unique DNA sequence
gcgaagtagcagaacccggg

SEQ ID NO: 5906 - DNA, 20 bp, Artificial
  20-mer unique DNA sequence
ggttaggggcgggagagctg

SEQ ID NO: 5907 - DNA, 20 bp, Artificial
  20-mer unique DNA sequence
agcccgtctggccatgttca

SEQ ID NO: 5908 - DNA, 20 bp, Artificial
  20-mer unique DNA sequence
aaacaaatggcgccgtcgaa

SEQ ID NO: 5909 - DNA, 20 bp, Artificial
  20-mer unique DNA sequence
gattggcctattcgcaccgc

SEQ ID NO: 5910 - DNA, 20 bp, Artificial
  20-mer unique DNA sequence
tcaattgtgaggcggcgaac

SEQ ID NO: 5911 - DNA, 20 bp, Artificial
  20-mer unique DNA sequence
gcgagatgaagcgggaatgg

SEQ ID NO: 5912 - DNA, 20 bp, Artificial
  20-mer unique DNA sequence
acgggggggcgacttcctat

SEQ ID NO: 5913 - DNA, 20 bp, Artificial
  20-mer unique DNA sequence
cgagcgaaccttggagtggt

SEQ ID NO: 5914 - DNA, 20 bp, Artificial
  20-mer unique DNA sequence
gctactgcctgaccctgccg

SEQ ID NO: 5915 - DNA, 20 bp, Artificial
  20-mer unique DNA sequence
gggggttttcgctgtctgca

SEQ ID NO: 5916 - DNA, 20 bp, Artificial
  20-mer unique DNA sequence
aggggggaatcgtaggagcg

SEQ ID NO: 5917 - DNA, 20 bp, Artificial
  20-mer unique DNA sequence
gttcccctgcctcttgctgc

SEQ ID NO: 5918 - DNA, 20 bp, Artificial
  20-mer unique DNA sequence
agtagccactccacgcgcgc

SEQ ID NO: 5919 - DNA, 20 bp, Artificial
  20-mer unique DNA sequence
taccgcttcccgggttcctc

SEQ ID NO: 5920 - DNA, 20 bp, Artificial
  20-mer unique DNA sequence
cccttcgataccaccgccac

SEQ ID NO: 5921 - DNA, 20 bp, Artificial
  20-mer unique DNA sequence
ccgccgatgtgagtgattgc

SEQ ID NO: 5922 - DNA, 20 bp, Artificial
  20-mer unique DNA sequence
cagggcgcaagtggggtgtc

SEQ ID NO: 5923 - DNA, 20 bp, Artificial
  20-mer unique DNA sequence
accccaccgcgttcatgcag

SEQ ID NO: 5924 - DNA, 20 bp, Artificial
  20-mer unique DNA sequence
cgggccgcaacccttgatct

SEQ ID NO: 5925 - DNA, 20 bp, Artificial
  20-mer unique DNA sequence
tgttatgcggcacgacggac

SEQ ID NO: 5926 - DNA, 20 bp, Artificial
  20-mer unique DNA sequence
ggctgtgggcgaggagggag

SEQ ID NO: 5927 - DNA, 20 bp, Artificial
  20-mer unique DNA sequence
agaatcccggcgccatacag

SEQ ID NO: 5928 - DNA, 20 bp, Artificial
  20-mer unique DNA sequence
ccgtcgtttccctaacccca

SEQ ID NO: 5929 - DNA, 20 bp, Artificial
  20-mer unique DNA sequence
tttcccgacttcctgcccaa

SEQ ID NO: 5930 - DNA, 20 bp, Artificial
  20-mer unique DNA sequence
gatgatgttcggccggtggt

SEQ ID NO: 5931 - DNA, 20 bp, Artificial
  20-mer unique DNA sequence
ttgtgttttgaaggcgccga

SEQ ID NO: 5932 - DNA, 20 bp, Artificial
  20-mer unique DNA sequence
catctacgcccaacccgctg

SEQ ID NO: 5933 - DNA, 20 bp, Artificial
  20-mer unique DNA sequence
gcgaaagacgagaggctggg

SEQ ID NO: 5934 - DNA, 20 bp, Artificial
  20-mer unique DNA sequence
ggtctccgccgcctccttac

SEQ ID NO: 5935 - DNA, 20 bp, Artificial
  20-mer unique DNA sequence
ccgagacgaaatgacgcgca

SEQ ID NO: 5936 - DNA, 20 bp, Artificial
  20-mer unique DNA sequence
accaaggccgcaccgatgat

SEQ ID NO: 5937 - DNA, 20 bp, Artificial
  20-mer unique DNA sequence
gctgccttacgcgggattgg

SEQ ID NO: 5938 - DNA, 20 bp, Artificial
  20-mer unique DNA sequence
taatggtcttggaggtggcg

SEQ ID NO: 5939 - DNA, 20 bp, Artificial
  20-mer unique DNA sequence
acagggaccgatgagaggcg

SEQ ID NO: 5940 - DNA, 20 bp, Artificial
  20-mer unique DNA sequence
cggatccggactcgctcatt

SEQ ID NO: 5941 - DNA, 20 bp, Artificial
  20-mer unique DNA sequence
tgagctcgaccgcactaggt

SEQ ID NO: 5942 - DNA, 20 bp, Artificial
  20-mer unique DNA sequence
gcagcagtacgggccaacaa

SEQ ID NO: 5943 - DNA, 20 bp, Artificial
  20-mer unique DNA sequence
tcgcggtggtgcaaaggaaa

SEQ ID NO: 5944 - DNA, 20 bp, Artificial
  20-mer unique DNA sequence
ctttctccgcttgcccgttc

SEQ ID NO: 5945 - DNA, 20 bp, Artificial
  20-mer unique DNA sequence
ggacgggcaggggaaagaca

SEQ ID NO: 5946 - DNA, 20 bp, Artificial
  20-mer unique DNA sequence
gcacgcccacgaaaaggaaa

SEQ ID NO: 5947 - DNA, 20 bp, Artificial
  20-mer unique DNA sequence
aggcactggcgggtatttgg

SEQ ID NO: 5948 - DNA, 20 bp, Artificial
  20-mer unique DNA sequence
gtgcgtttggaccctgtggc

SEQ ID NO: 5949 - DNA, 20 bp, Artificial
  20-mer unique DNA sequence
tcgttccggcggtttactcc

SEQ ID NO: 5950 - DNA, 20 bp, Artificial
  20-mer unique DNA sequence
gcggttggctgctttgatga

SEQ ID NO: 5951 - DNA, 20 bp, Artificial
  20-mer unique DNA sequence
cccgccgtcttgctgctatt

SEQ ID NO: 5952 - DNA, 20 bp, Artificial
  20-mer unique DNA sequence
acacccagtccaggcccagc

SEQ ID NO: 5953 - DNA, 20 bp, Artificial
  20-mer unique DNA sequence
tgcggtcgggtaatgcctct

SEQ ID NO: 5954 - DNA, 20 bp, Artificial
  20-mer unique DNA sequence
acggcaccacgatacggcaa

SEQ ID NO: 5955 - DNA, 20 bp, Artificial
  20-mer unique DNA sequence
aatgatgtgtcggcggcgat

SEQ ID NO: 5956 - DNA, 20 bp, Artificial
  20-mer unique DNA sequence
cattcctcgtgctttccccg

SEQ ID NO: 5957 - DNA, 20 bp, Artificial
  20-mer unique DNA sequence
catggcaaagtcgggaagcg

SEQ ID NO: 5958 - DNA, 20 bp, Artificial
  20-mer unique DNA sequence
gggcgtaggcacttcttggc

SEQ ID NO: 5959 - DNA, 20 bp, Artificial
  20-mer unique DNA sequence
ttgtttcggggatcgctacc

SEQ ID NO: 5960 - DNA, 20 bp, Artificial
  20-mer unique DNA sequence
tcatgacacgtcgcgcggta

SEQ ID NO: 5961 - DNA, 20 bp, Artificial
  20-mer unique DNA sequence
tgcgtgccacgtcatcgaat

SEQ ID NO: 5962 - DNA, 20 bp, Artificial
  20-mer unique DNA sequence
ggaccacgccaacgacctga

SEQ ID NO: 5963 - DNA, 20 bp, Artificial
  20-mer unique DNA sequence
catgggtttcaggtcgcgct

SEQ ID NO: 5964 - DNA, 20 bp, Artificial
  20-mer unique DNA sequence
cccacccaacgccattccac

SEQ ID NO: 5965 - DNA, 20 bp, Artificial
  20-mer unique DNA sequence
gtgcgttactgttgccggcg

SEQ ID NO: 5966 - DNA, 20 bp, Artificial
  20-mer unique DNA sequence
cggggacacaggggatgagg

SEQ ID NO: 5967 - DNA, 20 bp, Artificial
  20-mer unique DNA sequence
ttcacccccgagccgtttgt

SEQ ID NO: 5968 - DNA, 20 bp, Artificial
  20-mer unique DNA sequence
ttccgtaaggtccagccggg

SEQ ID NO: 5969 - DNA, 20 bp, Artificial
  20-mer unique DNA sequence
cgcgggaagctgtagtgggg

SEQ ID NO: 5970 - DNA, 20 bp, Artificial
  20-mer unique DNA sequence
agtgctctgccgcgttggtc

SEQ ID NO: 5971 - DNA, 20 bp, Artificial
  20-mer unique DNA sequence
tgatattgcgcaggacgggg

SEQ ID NO: 5972 - DNA, 20 bp, Artificial
  20-mer unique DNA sequence
agaatggaaacgtgcgcccc

SEQ ID NO: 5973 - DNA, 20 bp, Artificial
  20-mer unique DNA sequence
tccaccccgcgctcaatcta

SEQ ID NO: 5974 - DNA, 20 bp, Artificial
  20-mer unique DNA sequence
ttgcccgctgtcctccttgc

SEQ ID NO: 5975 - DNA, 20 bp, Artificial
  20-mer unique DNA sequence
cggtggtcgcggtgaatctt

SEQ ID NO: 5976 - DNA, 20 bp, Artificial
  20-mer unique DNA sequence
cgacgccaccatacctgaaa

SEQ ID NO: 5977 - DNA, 20 bp, Artificial
  20-mer unique DNA sequence
atacccgcctaccgaccgca

SEQ ID NO: 5978 - DNA, 20 bp, Artificial
  20-mer unique DNA sequence
ccggagccacagggacagct

SEQ ID NO: 5979 - DNA, 20 bp, Artificial
  20-mer unique DNA sequence
catgcagtcggtgggagggc

SEQ ID NO: 5980 - DNA, 20 bp, Artificial
  20-mer unique DNA sequence
attcataaccgcgggacgct

SEQ ID NO: 5981 - DNA, 20 bp, Artificial
  20-mer unique DNA sequence
acgcctgctttgtgaccgac

SEQ ID NO: 5982 - DNA, 20 bp, Artificial
  20-mer unique DNA sequence
ttccctgccaacgacactgc

SEQ ID NO: 5983 - DNA, 20 bp, Artificial
  20-mer unique DNA sequence
cccccaggcatcacatcacc

SEQ ID NO: 5984 - DNA, 20 bp, Artificial
  20-mer unique DNA sequence
accatgcgaaacggccaact

SEQ ID NO: 5985 - DNA, 20 bp, Artificial
  20-mer unique DNA sequence
gtcatagaagggcctgcgcc

SEQ ID NO: 5986 - DNA, 20 bp, Artificial
  20-mer unique DNA sequence
gttcaaaagagggcgggggc

SEQ ID NO: 5987 - DNA, 20 bp, Artificial
  20-mer unique DNA sequence
tttgaggcgcggatggttga

SEQ ID NO: 5988 - DNA, 20 bp, Artificial
  20-mer unique DNA sequence
ccaataccgttccgcctcgt

SEQ ID NO: 5989 - DNA, 20 bp, Artificial
  20-mer unique DNA sequence
tgacgggagcaaggcgatga

SEQ ID NO: 5990 - DNA, 20 bp, Artificial
  20-mer unique DNA sequence
tcagaaatcgcgaggggggt

SEQ ID NO: 5991 - DNA, 20 bp, Artificial
  20-mer unique DNA sequence
agatttcgcagacgcccggg

SEQ ID NO: 5992 - DNA, 20 bp, Artificial
  20-mer unique DNA sequence
agagcggtgcgggtattcga

SEQ ID NO: 5993 - DNA, 20 bp, Artificial
  20-mer unique DNA sequence
catgcgttgccgttcctttg

SEQ ID NO: 5994 - DNA, 20 bp, Artificial
  20-mer unique DNA sequence
ggtagtttgtcccgcccgtc

SEQ ID NO: 5995 - DNA, 20 bp, Artificial
  20-mer unique DNA sequence
tggtgttggacggatggctg

SEQ ID NO: 5996 - DNA, 20 bp, Artificial
  20-mer unique DNA sequence
aggcgcgtggagtgaattgc

SEQ ID NO: 5997 - DNA, 20 bp, Artificial
  20-mer unique DNA sequence
ggtccggaatgcgcaaaagc

SEQ ID NO: 5998 - DNA, 20 bp, Artificial
  20-mer unique DNA sequence
cgaccatactccccgctccc

SEQ ID NO: 5999 - DNA, 20 bp, Artificial
  20-mer unique DNA sequence
gccccaaaacgttccagcac

SEQ ID NO: 6000 - DNA, 20 bp, Artificial
  20-mer unique DNA sequence
ggggagtcgcatcacaggga

SEQ ID NO: 6001 - DNA, 20 bp, Artificial
  20-mer unique DNA sequence
taacgtagcggcgagagcca

SEQ ID NO: 6002 - DNA, 20 bp, Artificial
  20-mer unique DNA sequence
tgtgggctgctggggtcaaa

SEQ ID NO: 6003 - DNA, 20 bp, Artificial
  20-mer unique DNA sequence
cccgcggagattaggttggc

SEQ ID NO: 6004 - DNA, 20 bp, Artificial
  20-mer unique DNA sequence
acaccctgccccctcttcaa

SEQ ID NO: 6005 - DNA, 20 bp, Artificial
  20-mer unique DNA sequence
gctccgcctcgcccatccta

SEQ ID NO: 6006 - DNA, 20 bp, Artificial
  20-mer unique DNA sequence
gcctatgatcgcgcgctttg

SEQ ID NO: 6007 - DNA, 20 bp, Artificial
  20-mer unique DNA sequence
gaagtatccgcgacgcctcg

SEQ ID NO: 6008 - DNA, 20 bp, Artificial
  20-mer unique DNA sequence
gcgccgtccgaagtaccatg

SEQ ID NO: 6009 - DNA, 20 bp, Artificial
  20-mer unique DNA sequence
gcgcctccctcttgttcgaa

SEQ ID NO: 6010 - DNA, 20 bp, Artificial
  20-mer unique DNA sequence
caagggttttgtgcggggga

SEQ ID NO: 6011 - DNA, 20 bp, Artificial
  20-mer unique DNA sequence
gtgagcggagggggcactgt

SEQ ID NO: 6012 - DNA, 20 bp, Artificial
  20-mer unique DNA sequence
cgacaatcgaactccgcggc

SEQ ID NO: 6013 - DNA, 20 bp, Artificial
  20-mer unique DNA sequence
cggggacgatcgtaggctgc

SEQ ID NO: 6014 - DNA, 20 bp, Artificial
  20-mer unique DNA sequence
ggcagggggctacattcggt

SEQ ID NO: 6015 - DNA, 20 bp, Artificial
  20-mer unique DNA sequence
cggttgctcgctgtttcgct

SEQ ID NO: 6016 - DNA, 20 bp, Artificial
  20-mer unique DNA sequence
gagcgcggtgacaggtattg

SEQ ID NO: 6017 - DNA, 20 bp, Artificial
  20-mer unique DNA sequence
aggggagggagagctgcgga

SEQ ID NO: 6018 - DNA, 20 bp, Artificial
  20-mer unique DNA sequence
gatatttccgcccgccgacc

SEQ ID NO: 6019 - DNA, 20 bp, Artificial
  20-mer unique DNA sequence
aatgaatggtcggcacggga

SEQ ID NO: 6020 - DNA, 20 bp, Artificial
  20-mer unique DNA sequence
aatgccgttcccctgtcctg

SEQ ID NO: 6021 - DNA, 20 bp, Artificial
  20-mer unique DNA sequence
gccgtactacagggtcgcaa

SEQ ID NO: 6022 - DNA, 20 bp, Artificial
  20-mer unique DNA sequence
taaccgaaccgcctcacgct

SEQ ID NO: 6023 - DNA, 20 bp, Artificial
  20-mer unique DNA sequence
acctcgttagggccgatcca

SEQ ID NO: 6024 - DNA, 20 bp, Artificial
  20-mer unique DNA sequence
ccccccaggcatccgtcatt

SEQ ID NO: 6025 - DNA, 20 bp, Artificial
  20-mer unique DNA sequence
atggaagcggcgagcaaagc

SEQ ID NO: 6026 - DNA, 20 bp, Artificial
  20-mer unique DNA sequence
gggcggcttaacttggggca

SEQ ID NO: 6027 - DNA, 20 bp, Artificial
  20-mer unique DNA sequence
gatcggggcctgggtgtggt

SEQ ID NO: 6028 - DNA, 20 bp, Artificial
  20-mer unique DNA sequence
cccgagccgccatagacctt

SEQ ID NO: 6029 - DNA, 20 bp, Artificial
  20-mer unique DNA sequence
aatccccgtgtcctctcccc

SEQ ID NO: 6030 - DNA, 20 bp, Artificial
  20-mer unique DNA sequence
cagcccgtcgaacagcccag

SEQ ID NO: 6031 - DNA, 20 bp, Artificial
  20-mer unique DNA sequence
tcagccgagccgcacataag

SEQ ID NO: 6032 - DNA, 20 bp, Artificial
  20-mer unique DNA sequence
aagtggggtcgcgtatggga

SEQ ID NO: 6033 - DNA, 20 bp, Artificial
  20-mer unique DNA sequence
gagaattgggggtccgagcg

SEQ ID NO: 6034 - DNA, 20 bp, Artificial
  20-mer unique DNA sequence
gcggcagagaggcggaagag

SEQ ID NO: 6035 - DNA, 20 bp, Artificial
  20-mer unique DNA sequence
agaccgcccaaaccccaagg

SEQ ID NO: 6036 - DNA, 20 bp, Artificial
  20-mer unique DNA sequence
ccttgcaaaaacccggggaa

SEQ ID NO: 6037 - DNA, 20 bp, Artificial
  20-mer unique DNA sequence
cggggggaagtgacgggctc

SEQ ID NO: 6038 - DNA, 20 bp, Artificial
  20-mer unique DNA sequence
tacagacccgcccttccgtg

SEQ ID NO: 6039 - DNA, 20 bp, Artificial
  20-mer unique DNA sequence
tgggaggttgttggcgtgag

SEQ ID NO: 6040 - DNA, 20 bp, Artificial
  20-mer unique DNA sequence
gcagcaaagccgactacccg

SEQ ID NO: 6041 - DNA, 20 bp, Artificial
  20-mer unique DNA sequence
tcgcctcggtatctttcgcc

SEQ ID NO: 6042 - DNA, 20 bp, Artificial
  20-mer unique DNA sequence
cgttccccatccccatccac

SEQ ID NO: 6043 - DNA, 20 bp, Artificial
  20-mer unique DNA sequence
tcctgcccgaccttttgtgc

SEQ ID NO: 6044 - DNA, 20 bp, Artificial
  20-mer unique DNA sequence
cgccgagcagagtttcaccc

SEQ ID NO: 6045 - DNA, 20 bp, Artificial
  20-mer unique DNA sequence
aggccggctcccaacaagac

SEQ ID NO: 6046 - DNA, 20 bp, Artificial
  20-mer unique DNA sequence
tactcgccaccacgcccatt

SEQ ID NO: 6047 - DNA, 20 bp, Artificial
  20-mer unique DNA sequence
ccaccccgtcacacgcaata

SEQ ID NO: 6048 - DNA, 20 bp, Artificial
  20-mer unique DNA sequence
gagcagggaatttgacgggg

SEQ ID NO: 6049 - DNA, 20 bp, Artificial
  20-mer unique DNA sequence
aacgccaatagccaccctgc

SEQ ID NO: 6050 - DNA, 20 bp, Artificial
  20-mer unique DNA sequence
tcatgtccaccccgtcccac

SEQ ID NO: 6051 - DNA, 20 bp, Artificial
  20-mer unique DNA sequence
caccctcacctcgcctccat

SEQ ID NO: 6052 - DNA, 20 bp, Artificial
  20-mer unique DNA sequence
agcagggcaacagctaagga

SEQ ID NO: 6053 - DNA, 20 bp, Artificial
  20-mer unique DNA sequence
tcgcttccgtcctcccctct

SEQ ID NO: 6054 - DNA, 20 bp, Artificial
  20-mer unique DNA sequence
tcacaagcggcaacctacgg

SEQ ID NO: 6055 - DNA, 20 bp, Artificial
  20-mer unique DNA sequence
accggacagcccaacaacgt

SEQ ID NO: 6056 - DNA, 20 bp, Artificial
  20-mer unique DNA sequence
ccggctgcgctccctttctt

SEQ ID NO: 6057 - DNA, 20 bp, Artificial
  20-mer unique DNA sequence
cctcccatccctccccacgt

SEQ ID NO: 6058 - DNA, 20 bp, Artificial
  20-mer unique DNA sequence
accgccccccagcaataagc

SEQ ID NO: 6059 - DNA, 20 bp, Artificial
  20-mer unique DNA sequence
tgggacagggcggagtagca

SEQ ID NO: 6060 - DNA, 20 bp, Artificial
  20-mer unique DNA sequence
accgtgggcgggtgaacatt

SEQ ID NO: 6061 - DNA, 20 bp, Artificial
  20-mer unique DNA sequence
tcacacctcaccccgttcgc

SEQ ID NO: 6062 - DNA, 20 bp, Artificial
  20-mer unique DNA sequence
acaggaaggaccgcgtgcag

SEQ ID NO: 6063 - DNA, 20 bp, Artificial
  20-mer unique DNA sequence
ccgctgcctaagtaagcccg

SEQ ID NO: 6064 - DNA, 20 bp, Artificial
  20-mer unique DNA sequence
tgcggaaaactacggggcag

SEQ ID NO: 6065 - DNA, 20 bp, Artificial
  20-mer unique DNA sequence
tttcggctcttgcgtccctc

SEQ ID NO: 6066 - DNA, 20 bp, Artificial
  20-mer unique DNA sequence
ctgtctatgcggaggtggcg

SEQ ID NO: 6067 - DNA, 20 bp, Artificial
  20-mer unique DNA sequence
ctccgtcgctcgtgcttgtg

SEQ ID NO: 6068 - DNA, 20 bp, Artificial
  20-mer unique DNA sequence
ggggttcactagtcgggggg

SEQ ID NO: 6069 - DNA, 20 bp, Artificial
  20-mer unique DNA sequence
cgctccccgcctttacccta

SEQ ID NO: 6070 - DNA, 20 bp, Artificial
  20-mer unique DNA sequence
gacggtgtgcgggatatcgg

SEQ ID NO: 6071 - DNA, 20 bp, Artificial
  20-mer unique DNA sequence
aaaccaacgcggaggaagcc

SEQ ID NO: 6072 - DNA, 20 bp, Artificial
  20-mer unique DNA sequence
cctagcatcccaaacgcgca

SEQ ID NO: 6073 - DNA, 20 bp, Artificial
  20-mer unique DNA sequence
attaaacccggccgcgacca

SEQ ID NO: 6074 - DNA, 20 bp, Artificial
  20-mer unique DNA sequence
aataatgcgccaagccccac

SEQ ID NO: 6075 - DNA, 20 bp, Artificial
  20-mer unique DNA sequence
tacttcccctgcttcgccca

SEQ ID NO: 6076 - DNA, 20 bp, Artificial
  20-mer unique DNA sequence
tagcccccgcctccgacaat

SEQ ID NO: 6077 - DNA, 20 bp, Artificial
  20-mer unique DNA sequence
aggttgagagcaaggggggg

SEQ ID NO: 6078 - DNA, 20 bp, Artificial
  20-mer unique DNA sequence
accaacggacaagccccact

SEQ ID NO: 6079 - DNA, 20 bp, Artificial
  20-mer unique DNA sequence
ccaatattctcgcgcgtgcc

SEQ ID NO: 6080 - DNA, 20 bp, Artificial
  20-mer unique DNA sequence
gtctggggcctcggcttttg

SEQ ID NO: 6081 - DNA, 20 bp, Artificial
  20-mer unique DNA sequence
tatgaccctgactccgcgcg

SEQ ID NO: 6082 - DNA, 20 bp, Artificial
  20-mer unique DNA sequence
tgacagccaactccagcgcc

SEQ ID NO: 6083 - DNA, 20 bp, Artificial
  20-mer unique DNA sequence
cttgtccactgactggcgcg

SEQ ID NO: 6084 - DNA, 20 bp, Artificial
  20-mer unique DNA sequence
tggttgtggtgcgaagaggg

SEQ ID NO: 6085 - DNA, 20 bp, Artificial
  20-mer unique DNA sequence
cgcctcagcccctttcctcg

SEQ ID NO: 6086 - DNA, 20 bp, Artificial
  20-mer unique DNA sequence
tcaatgtggggcgcggatag

SEQ ID NO: 6087 - DNA, 20 bp, Artificial
  20-mer unique DNA sequence
acctcgccgcaatgaaacgc

SEQ ID NO: 6088 - DNA, 20 bp, Artificial
  20-mer unique DNA sequence
tcccgcatcgcccttacaca

SEQ ID NO: 6089 - DNA, 20 bp, Artificial
  20-mer unique DNA sequence
tgcgggttggcttatgtggc

SEQ ID NO: 6090 - DNA, 20 bp, Artificial
  20-mer unique DNA sequence
actcgtacagtcgacgctcg

SEQ ID NO: 6091 - DNA, 20 bp, Artificial
  20-mer unique DNA sequence
aaaccgcagtgagacgcgaa

SEQ ID NO: 6092 - DNA, 20 bp, Artificial
  20-mer unique DNA sequence
ggcggggaaggagcaaaacg

SEQ ID NO: 6093 - DNA, 20 bp, Artificial
  20-mer unique DNA sequence
gactggcgaggcgaagacgg

SEQ ID NO: 6094 - DNA, 20 bp, Artificial
  20-mer unique DNA sequence
aggacacggccgacagacag

SEQ ID NO: 6095 - DNA, 20 bp, Artificial
  20-mer unique DNA sequence
tcctggcttgtgtggcgtgc

SEQ ID NO: 6096 - DNA, 20 bp, Artificial
  20-mer unique DNA sequence
acacaacgccccgaacctct

SEQ ID NO: 6097 - DNA, 20 bp, Artificial
  20-mer unique DNA sequence
cgctcccactccgcccaaat

SEQ ID NO: 6098 - DNA, 20 bp, Artificial
  20-mer unique DNA sequence
ccggtggtctgtgcatggct

SEQ ID NO: 6099 - DNA, 20 bp, Artificial
  20-mer unique DNA sequence
cggggctattgggttggttg

SEQ ID NO: 6100 - DNA, 20 bp, Artificial
  20-mer unique DNA sequence
agacagttgaccgagggcgc

SEQ ID NO: 6101 - DNA, 20 bp, Artificial
  20-mer unique DNA sequence
gacgaggggacgaggggatt

SEQ ID NO: 6102 - DNA, 20 bp, Artificial
  20-mer unique DNA sequence
cgaccgtacgtgactttcgc

SEQ ID NO: 6103 - DNA, 20 bp, Artificial
  20-mer unique DNA sequence
ggccctgggattacgcaaaa

SEQ ID NO: 6104 - DNA, 20 bp, Artificial
  20-mer unique DNA sequence
taaggggagacttggtgcga

SEQ ID NO: 6105 - DNA, 20 bp, Artificial
  20-mer unique DNA sequence
gctggcgggaagaggaaggc

SEQ ID NO: 6106 - DNA, 20 bp, Artificial
  20-mer unique DNA sequence
cttcttgggttcgcctccgg

SEQ ID NO: 6107 - DNA, 20 bp, Artificial
  20-mer unique DNA sequence
agggtccggtatggcagggc

SEQ ID NO: 6108 - DNA, 20 bp, Artificial
  20-mer unique DNA sequence
ggggacggacgactggggag

SEQ ID NO: 6109 - DNA, 20 bp, Artificial
  20-mer unique DNA sequence
atcagcaatcggccaacccc

SEQ ID NO: 6110 - DNA, 20 bp, Artificial
  20-mer unique DNA sequence
acagaggctcctgagcgcaa

SEQ ID NO: 6111 - DNA, 20 bp, Artificial
  20-mer unique DNA sequence
aagcgccgcatgttagtgtg

SEQ ID NO: 6112 - DNA, 20 bp, Artificial
  20-mer unique DNA sequence
caaggcgtggcggagagttc

SEQ ID NO: 6113 - DNA, 20 bp, Artificial
  20-mer unique DNA sequence
aaaaagaggcaggcgggacg

SEQ ID NO: 6114 - DNA, 20 bp, Artificial
  20-mer unique DNA sequence
aatgcctgagctcaccgagg

SEQ ID NO: 6115 - DNA, 20 bp, Artificial
  20-mer unique DNA sequence
gtcactgggttgcggcgttg

SEQ ID NO: 6116 - DNA, 20 bp, Artificial
  20-mer unique DNA sequence
ggcaaggaggcggactgggt

SEQ ID NO: 6117 - DNA, 20 bp, Artificial
  20-mer unique DNA sequence
tgacagtttgacggcggggg

SEQ ID NO: 6118 - DNA, 20 bp, Artificial
  20-mer unique DNA sequence
tgaccgataagccccgggat

SEQ ID NO: 6119 - DNA, 20 bp, Artificial
  20-mer unique DNA sequence
agcggcgaggttgcatatgc

SEQ ID NO: 6120 - DNA, 20 bp, Artificial
  20-mer unique DNA sequence
tgccgtgttctccgcttcca

SEQ ID NO: 6121 - DNA, 20 bp, Artificial
  20-mer unique DNA sequence
tgaacgaccaagcacccccc

SEQ ID NO: 6122 - DNA, 20 bp, Artificial
  20-mer unique DNA sequence
gtgcgtcggacttcgatcct

SEQ ID NO: 6123 - DNA, 20 bp, Artificial
  20-mer unique DNA sequence
accctccgtgagctgggaat

SEQ ID NO: 6124 - DNA, 20 bp, Artificial
  20-mer unique DNA sequence
agaatagcaggccgcggaaa

SEQ ID NO: 6125 - DNA, 20 bp, Artificial
  20-mer unique DNA sequence
tttggcgacgttggacaggg

SEQ ID NO: 6126 - DNA, 20 bp, Artificial
  20-mer unique DNA sequence
tttggcgcgcattttcacat

SEQ ID NO: 6127 - DNA, 20 bp, Artificial
  20-mer unique DNA sequence
gcgcccagatctttccccac

SEQ ID NO: 6128 - DNA, 20 bp, Artificial
  20-mer unique DNA sequence
acctaacccgccgcaactgt

SEQ ID NO: 6129 - DNA, 20 bp, Artificial
  20-mer unique DNA sequence
cccccgctcttgtaccctcc

SEQ ID NO: 6130 - DNA, 20 bp, Artificial
  20-mer unique DNA sequence
cccctgtcccatccccgtcg

SEQ ID NO: 6131 - DNA, 20 bp, Artificial
  20-mer unique DNA sequence
cgggtgggcagcagattggt

SEQ ID NO: 6132 - DNA, 20 bp, Artificial
  20-mer unique DNA sequence
gtagggaatcagggcgggcg

SEQ ID NO: 6133 - DNA, 20 bp, Artificial
  20-mer unique DNA sequence
gtcctatcgaaaccccgcgg

SEQ ID NO: 6134 - DNA, 20 bp, Artificial
  20-mer unique DNA sequence
aggtccacattctcgcccgc

SEQ ID NO: 6135 - DNA, 20 bp, Artificial
  20-mer unique DNA sequence
actgcaacccccgctcatta

SEQ ID NO: 6136 - DNA, 20 bp, Artificial
  20-mer unique DNA sequence
attggttttgggcgctcgga

SEQ ID NO: 6137 - DNA, 20 bp, Artificial
  20-mer unique DNA sequence
aaaagcgacgtggggcaaac

SEQ ID NO: 6138 - DNA, 20 bp, Artificial
  20-mer unique DNA sequence
atccaccccgcataatccca

SEQ ID NO: 6139 - DNA, 20 bp, Artificial
  20-mer unique DNA sequence
tgggcttttgttcggatgca

SEQ ID NO: 6140 - DNA, 20 bp, Artificial
  20-mer unique DNA sequence
acgggcatggtcgacggcta

SEQ ID NO: 6141 - DNA, 20 bp, Artificial
  20-mer unique DNA sequence
tttccaagggcgggcgagtt

SEQ ID NO: 6142 - DNA, 20 bp, Artificial
  20-mer unique DNA sequence
gcccggcatactggtcgtct

SEQ ID NO: 6143 - DNA, 20 bp, Artificial
  20-mer unique DNA sequence
cacattcggtggttgagcgg

SEQ ID NO: 6144 - DNA, 20 bp, Artificial
  20-mer unique DNA sequence
tcgttggtttcagggcgcac

SEQ ID NO: 6145 - DNA, 20 bp, Artificial
  20-mer unique DNA sequence
ccttggaccgcaccctggac

SEQ ID NO: 6146 - DNA, 20 bp, Artificial
  20-mer unique DNA sequence
tggtctgttcgtgggcatgg

SEQ ID NO: 6147 - DNA, 20 bp, Artificial
  20-mer unique DNA sequence
tcagaagggggtgcacaggg

SEQ ID NO: 6148 - DNA, 20 bp, Artificial
  20-mer unique DNA sequence
cgcgaccccaccgagaccta

SEQ ID NO: 6149 - DNA, 20 bp, Artificial
  20-mer unique DNA sequence
ctgttcactgcgcgccctcc

SEQ ID NO: 6150 - DNA, 20 bp, Artificial
  20-mer unique DNA sequence
tacggcctgccacaggttag

SEQ ID NO: 6151 - DNA, 20 bp, Artificial
  20-mer unique DNA sequence
ggtgcaggcgtacgaactct

SEQ ID NO: 6152 - DNA, 20 bp, Artificial
  20-mer unique DNA sequence
caaggcgatcccacaaggct

SEQ ID NO: 6153 - DNA, 20 bp, Artificial
  20-mer unique DNA sequence
gcctacacgagaaccggcgt

SEQ ID NO: 6154 - DNA, 20 bp, Artificial
  20-mer unique DNA sequence
gacgaagaggcggggcaagt

SEQ ID NO: 6155 - DNA, 20 bp, Artificial
  20-mer unique DNA sequence
caaaaccccccaatccctgt

SEQ ID NO: 6156 - DNA, 20 bp, Artificial
  20-mer unique DNA sequence
ggacaatcggtgggagggtg

SEQ ID NO: 6157 - DNA, 20 bp, Artificial
  20-mer unique DNA sequence
agcgaccacgaagaacgcgg

SEQ ID NO: 6158 - DNA, 20 bp, Artificial
  20-mer unique DNA sequence
aaaacagttgcccgcgagcc

SEQ ID NO: 6159 - DNA, 20 bp, Artificial
  20-mer unique DNA sequence
gggagaaacgggcaggccta

SEQ ID NO: 6160 - DNA, 20 bp, Artificial
  20-mer unique DNA sequence
aacccggacgagcccaaagc

SEQ ID NO: 6161 - DNA, 20 bp, Artificial
  20-mer unique DNA sequence
ggagaggccatgcaacacgc

SEQ ID NO: 6162 - DNA, 20 bp, Artificial
  20-mer unique DNA sequence
ccaaaccccgaccgacaatc

SEQ ID NO: 6163 - DNA, 20 bp, Artificial
  20-mer unique DNA sequence
ccttttgccgtaccctcccg

SEQ ID NO: 6164 - DNA, 20 bp, Artificial
  20-mer unique DNA sequence
atcgtggaagctgcgcggtc

SEQ ID NO: 6165 - DNA, 20 bp, Artificial
  20-mer unique DNA sequence
tgtgacttggagggccggtg

SEQ ID NO: 6166 - DNA, 20 bp, Artificial
  20-mer unique DNA sequence
tggggtgtcgggcaggtagc

SEQ ID NO: 6167 - DNA, 20 bp, Artificial
  20-mer unique DNA sequence
aacagggaaggccgaccagg

SEQ ID NO: 6168 - DNA, 20 bp, Artificial
  20-mer unique DNA sequence
ggcttgtctcagggcgatct

SEQ ID NO: 6169 - DNA, 20 bp, Artificial
  20-mer unique DNA sequence
gcttactagggtgccagcgt

SEQ ID NO: 6170 - DNA, 20 bp, Artificial
  20-mer unique DNA sequence
ccgttcgtcccaccttgcca

SEQ ID NO: 6171 - DNA, 20 bp, Artificial
  20-mer unique DNA sequence
aacaaccgaaggggctgacg

SEQ ID NO: 6172 - DNA, 20 bp, Artificial
  20-mer unique DNA sequence
cggcagcggacaagagaggt

SEQ ID NO: 6173 - DNA, 20 bp, Artificial
  20-mer unique DNA sequence
ggctcactttcgcattcccc

SEQ ID NO: 6174 - DNA, 20 bp, Artificial
  20-mer unique DNA sequence
cgtagatccgccagaagccg

SEQ ID NO: 6175 - DNA, 20 bp, Artificial
  20-mer unique DNA sequence
gcccctccgtcacacacaca

SEQ ID NO: 6176 - DNA, 20 bp, Artificial
  20-mer unique DNA sequence
gttgtgggtggagggggcag

SEQ ID NO: 6177 - DNA, 20 bp, Artificial
  20-mer unique DNA sequence
gcccgtcactgccgaacctt

SEQ ID NO: 6178 - DNA, 20 bp, Artificial
  20-mer unique DNA sequence
gctcttgatgggcggggtgt

SEQ ID NO: 6179 - DNA, 20 bp, Artificial
  20-mer unique DNA sequence
catctggtcggcgttgtggc

SEQ ID NO: 6180 - DNA, 20 bp, Artificial
  20-mer unique DNA sequence
accccccgccaccatcgata

SEQ ID NO: 6181 - DNA, 20 bp, Artificial
  20-mer unique DNA sequence
tgcggagatagggtcggggc

SEQ ID NO: 6182 - DNA, 20 bp, Artificial
  20-mer unique DNA sequence
ggcgtcccgaaccatcagct

SEQ ID NO: 6183 - DNA, 20 bp, Artificial
  20-mer unique DNA sequence
cgtcctatcgggttcccttg

SEQ ID NO: 6184 - DNA, 20 bp, Artificial
  20-mer unique DNA sequence
ctggccatttcgcgacgttg

SEQ ID NO: 6185 - DNA, 20 bp, Artificial
  20-mer unique DNA sequence
cgcactcctcgaccaccctc

SEQ ID NO: 6186 - DNA, 20 bp, Artificial
  20-mer unique DNA sequence
cggatagtgggcgcttggtc

SEQ ID NO: 6187 - DNA, 20 bp, Artificial
  20-mer unique DNA sequence
ttaacccagcccgccccact

SEQ ID NO: 6188 - DNA, 20 bp, Artificial
  20-mer unique DNA sequence
ataccatccgccgccctgaa

SEQ ID NO: 6189 - DNA, 20 bp, Artificial
  20-mer unique DNA sequence
aaggggggggcaaggaccag

SEQ ID NO: 6190 - DNA, 20 bp, Artificial
  20-mer unique DNA sequence
agtcgcgtcacccatgtagg

SEQ ID NO: 6191 - DNA, 20 bp, Artificial
  20-mer unique DNA sequence
cctgcgtcacgaggctatga

SEQ ID NO: 6192 - DNA, 20 bp, Artificial
  20-mer unique DNA sequence
cgcctcgtcgccctttgtta

SEQ ID NO: 6193 - DNA, 20 bp, Artificial
  20-mer unique DNA sequence
atggccctcgatcacgtcag

SEQ ID NO: 6194 - DNA, 20 bp, Artificial
  20-mer unique DNA sequence
tcgcggattgataacgtggc

SEQ ID NO: 6195 - DNA, 20 bp, Artificial
  20-mer unique DNA sequence
gatagccacccattgcgccc

SEQ ID NO: 6196 - DNA, 20 bp, Artificial
  20-mer unique DNA sequence
tttgcgcaccggtatgcacc

SEQ ID NO: 6197 - DNA, 20 bp, Artificial
  20-mer unique DNA sequence
ctaggagggagcgaagggca

SEQ ID NO: 6198 - DNA, 20 bp, Artificial
  20-mer unique DNA sequence
aagatcaaaccgccacccga

SEQ ID NO: 6199 - DNA, 20 bp, Artificial
  20-mer unique DNA sequence
tagacccctcgccgtttgcg

SEQ ID NO: 6200 - DNA, 20 bp, Artificial
  20-mer unique DNA sequence
cacggttcagcatgggtcgg

SEQ ID NO: 6201 - DNA, 20 bp, Artificial
  20-mer unique DNA sequence
cgccccctttgtcgatggtt

SEQ ID NO: 6202 - DNA, 20 bp, Artificial
  20-mer unique DNA sequence
tttggcttgggaatgggcga

SEQ ID NO: 6203 - DNA, 20 bp, Artificial
  20-mer unique DNA sequence
cgtggcggagcggagaagat

SEQ ID NO: 6204 - DNA, 20 bp, Artificial
  20-mer unique DNA sequence
agaccggagcgaggcgatta

SEQ ID NO: 6205 - DNA, 20 bp, Artificial
  20-mer unique DNA sequence
acccagtgcacctgtgaagg

SEQ ID NO: 6206 - DNA, 20 bp, Artificial
  20-mer unique DNA sequence
gacccctcccggcattcgtt

SEQ ID NO: 6207 - DNA, 20 bp, Artificial
  20-mer unique DNA sequence
agtggggcagacgcgtgaag

SEQ ID NO: 6208 - DNA, 20 bp, Artificial
  20-mer unique DNA sequence
tttcagttgggctggacggc

SEQ ID NO: 6209 - DNA, 20 bp, Artificial
  20-mer unique DNA sequence
catctgtcccgctccgcacc

SEQ ID NO: 6210 - DNA, 20 bp, Artificial
  20-mer unique DNA sequence
ggatcgagtttggcgggttg

SEQ ID NO: 6211 - DNA, 20 bp, Artificial
  20-mer unique DNA sequence
accgctagcaccgaacgcca

SEQ ID NO: 6212 - DNA, 20 bp, Artificial
  20-mer unique DNA sequence
accgcggaaacgcgtagagt

SEQ ID NO: 6213 - DNA, 20 bp, Artificial
  20-mer unique DNA sequence
gcccgatctcgcatagcctt

SEQ ID NO: 6214 - DNA, 20 bp, Artificial
  20-mer unique DNA sequence
ggtgccccctttaaatcgcc

SEQ ID NO: 6215 - DNA, 20 bp, Artificial
  20-mer unique DNA sequence
aaggcctgcgtagcgactga

SEQ ID NO: 6216 - DNA, 20 bp, Artificial
  20-mer unique DNA sequence
cgggatcaagagagggggct

SEQ ID NO: 6217 - DNA, 20 bp, Artificial
  20-mer unique DNA sequence
ttgccccgccacttgatctt

SEQ ID NO: 6218 - DNA, 20 bp, Artificial
  20-mer unique DNA sequence
gcacgaaagatggcgggcag

SEQ ID NO: 6219 - DNA, 20 bp, Artificial
  20-mer unique DNA sequence
gggcggtccagtttggggat

SEQ ID NO: 6220 - DNA, 20 bp, Artificial
  20-mer unique DNA sequence
atcgttgacagaggccggga

SEQ ID NO: 6221 - DNA, 20 bp, Artificial
  20-mer unique DNA sequence
ggcggccgaacgaaaagtac

SEQ ID NO: 6222 - DNA, 20 bp, Artificial
  20-mer unique DNA sequence
attcacttccgtgggcggcc

SEQ ID NO: 6223 - DNA, 20 bp, Artificial
  20-mer unique DNA sequence
gtggtgacagacggccaggc

SEQ ID NO: 6224 - DNA, 20 bp, Artificial
  20-mer unique DNA sequence
actcttagggcgcccgttac

SEQ ID NO: 6225 - DNA, 20 bp, Artificial
  20-mer unique DNA sequence
gagtgcgattcggggacgta

SEQ ID NO: 6226 - DNA, 20 bp, Artificial
  20-mer unique DNA sequence
atcgcggaggggctaacaca

SEQ ID NO: 6227 - DNA, 20 bp, Artificial
  20-mer unique DNA sequence
tgcttgtccggctcttcgct

SEQ ID NO: 6228 - DNA, 20 bp, Artificial
  20-mer unique DNA sequence
acaccgccccactccaaaaa

SEQ ID NO: 6229 - DNA, 20 bp, Artificial
  20-mer unique DNA sequence
attgcggggggtccagttga

SEQ ID NO: 6230 - DNA, 20 bp, Artificial
  20-mer unique DNA sequence
ttaccccttcgcccgcagtt

SEQ ID NO: 6231 - DNA, 20 bp, Artificial
  20-mer unique DNA sequence
cgatgatttgggggtcgtgg

SEQ ID NO: 6232 - DNA, 20 bp, Artificial
  20-mer unique DNA sequence
cgtccgcagaacatggctcc

SEQ ID NO: 6233 - DNA, 20 bp, Artificial
  20-mer unique DNA sequence
tcccgagggctagcacagga

SEQ ID NO: 6234 - DNA, 20 bp, Artificial
  20-mer unique DNA sequence
cggccatagtcgtcggttct

SEQ ID NO: 6235 - DNA, 20 bp, Artificial
  20-mer unique DNA sequence
acacctgatcacccccgctc

SEQ ID NO: 6236 - DNA, 20 bp, Artificial
  20-mer unique DNA sequence
tgattgccttgggggtgtga

SEQ ID NO: 6237 - DNA, 20 bp, Artificial
  20-mer unique DNA sequence
ccttcatccctgctgcccga

SEQ ID NO: 6238 - DNA, 20 bp, Artificial
  20-mer unique DNA sequence
tagggaccgactgccggaac

SEQ ID NO: 6239 - DNA, 20 bp, Artificial
  20-mer unique DNA sequence
aatgacccacgggagacggt

SEQ ID NO: 6240 - DNA, 20 bp, Artificial
  20-mer unique DNA sequence
ctcgcccgtcttctctcgct

SEQ ID NO: 6241 - DNA, 20 bp, Artificial
  20-mer unique DNA sequence
gttcggcgtccattgcaggt

SEQ ID NO: 6242 - DNA, 20 bp, Artificial
  20-mer unique DNA sequence
tgctccaatcccgaccccag

SEQ ID NO: 6243 - DNA, 20 bp, Artificial
  20-mer unique DNA sequence
ctcctccgccctcggctaac

SEQ ID NO: 6244 - DNA, 20 bp, Artificial
  20-mer unique DNA sequence
tgtgaacgccgtctggcaac

SEQ ID NO: 6245 - DNA, 20 bp, Artificial
  20-mer unique DNA sequence
ttaggcattctgggaccggg

SEQ ID NO: 6246 - DNA, 20 bp, Artificial
  20-mer unique DNA sequence
atgtagggcgactctcccgt

SEQ ID NO: 6247 - DNA, 20 bp, Artificial
  20-mer unique DNA sequence
aacgcggctctgttctaccg

SEQ ID NO: 6248 - DNA, 20 bp, Artificial
  20-mer unique DNA sequence
tgctttctgcgtccggctgt

SEQ ID NO: 6249 - DNA, 20 bp, Artificial
  20-mer unique DNA sequence
cggagtggacacgacactga

SEQ ID NO: 6250 - DNA, 20 bp, Artificial
  20-mer unique DNA sequence
gcgaatgggagcgaaaatcg

SEQ ID NO: 6251 - DNA, 20 bp, Artificial
  20-mer unique DNA sequence
ggggcgatgtgagaggcaaa

SEQ ID NO: 6252 - DNA, 20 bp, Artificial
  20-mer unique DNA sequence
tgtaacgacgggggcgaagc

SEQ ID NO: 6253 - DNA, 20 bp, Artificial
  20-mer unique DNA sequence
gacccatcgaacccgccaca

SEQ ID NO: 6254 - DNA, 20 bp, Artificial
  20-mer unique DNA sequence
attgtcccgtgcttgccccc

SEQ ID NO: 6255 - DNA, 20 bp, Artificial
  20-mer unique DNA sequence
ggcggttgtggctgatcgac

SEQ ID NO: 6256 - DNA, 20 bp, Artificial
  20-mer unique DNA sequence
ataacccactgcccggacca

SEQ ID NO: 6257 - DNA, 20 bp, Artificial
  20-mer unique DNA sequence
catctcctcggcgactcacg

SEQ ID NO: 6258 - DNA, 20 bp, Artificial
  20-mer unique DNA sequence
attgcgggaaagtgcgacct

SEQ ID NO: 6259 - DNA, 20 bp, Artificial
  20-mer unique DNA sequence
aggtaagcatgaacgtgcgc

SEQ ID NO: 6260 - DNA, 20 bp, Artificial
  20-mer unique DNA sequence
caaaaattccgcaaacggcg

SEQ ID NO: 6261 - DNA, 20 bp, Artificial
  20-mer unique DNA sequence
agccttgctgtccgccctag

SEQ ID NO: 6262 - DNA, 20 bp, Artificial
  20-mer unique DNA sequence
cggcgagaggcaaaaggcaa

SEQ ID NO: 6263 - DNA, 20 bp, Artificial
  20-mer unique DNA sequence
ttacccgccagcatcccagg

SEQ ID NO: 6264 - DNA, 20 bp, Artificial
  20-mer unique DNA sequence
ctcgcgtagccgctgatcta

SEQ ID NO: 6265 - DNA, 20 bp, Artificial
  20-mer unique DNA sequence
tcgctgcgcaggtctttagg

SEQ ID NO: 6266 - DNA, 20 bp, Artificial
  20-mer unique DNA sequence
acccctcgtgctggtttgtc

SEQ ID NO: 6267 - DNA, 20 bp, Artificial
  20-mer unique DNA sequence
ctgcccttccctaaccgcct

SEQ ID NO: 6268 - DNA, 20 bp, Artificial
  20-mer unique DNA sequence
ccagaaagcggtaggggtcg

SEQ ID NO: 6269 - DNA, 20 bp, Artificial
  20-mer unique DNA sequence
tgacaatccctgcgccatcg

SEQ ID NO: 6270 - DNA, 20 bp, Artificial
  20-mer unique DNA sequence
ggggatgggttgtgggacag

SEQ ID NO: 6271 - DNA, 20 bp, Artificial
  20-mer unique DNA sequence
aaggtatgcgcgtgcgggtg

SEQ ID NO: 6272 - DNA, 20 bp, Artificial
  20-mer unique DNA sequence
aggaccccgagcacaacccg

SEQ ID NO: 6273 - DNA, 20 bp, Artificial
  20-mer unique DNA sequence
gcgggaaccgaaagggaagg

SEQ ID NO: 6274 - DNA, 20 bp, Artificial
  20-mer unique DNA sequence
cactaaaagcctgcaccgcg

SEQ ID NO: 6275 - DNA, 20 bp, Artificial
  20-mer unique DNA sequence
acaaggccggggtcagtccc

SEQ ID NO: 6276 - DNA, 20 bp, Artificial
  20-mer unique DNA sequence
ttccgaccgccactacaccc

SEQ ID NO: 6277 - DNA, 20 bp, Artificial
  20-mer unique DNA sequence
aggggttgtcgttatggcgg

SEQ ID NO: 6278 - DNA, 20 bp, Artificial
  20-mer unique DNA sequence
gcagtgggggaggaccgaac

SEQ ID NO: 6279 - DNA, 20 bp, Artificial
  20-mer unique DNA sequence
tccgacccgaccacgctttg

SEQ ID NO: 6280 - DNA, 20 bp, Artificial
  20-mer unique DNA sequence
cagacgaattcccatgcggg

SEQ ID NO: 6281 - DNA, 20 bp, Artificial
  20-mer unique DNA sequence
agttagcggttccatcgccg

SEQ ID NO: 6282 - DNA, 20 bp, Artificial
  20-mer unique DNA sequence
gcggaggggtgtcggatagc

SEQ ID NO: 6283 - DNA, 20 bp, Artificial
  20-mer unique DNA sequence
atgcttctcggggggttgct

SEQ ID NO: 6284 - DNA, 20 bp, Artificial
  20-mer unique DNA sequence
atactcagccctggaccgga

SEQ ID NO: 6285 - DNA, 20 bp, Artificial
  20-mer unique DNA sequence
atccggtcagtctgtgccag

SEQ ID NO: 6286 - DNA, 20 bp, Artificial
  20-mer unique DNA sequence
gtttcctggggtgaggtcgc

SEQ ID NO: 6287 - DNA, 20 bp, Artificial
  20-mer unique DNA sequence
acccccctcccccaacatag

SEQ ID NO: 6288 - DNA, 20 bp, Artificial
  20-mer unique DNA sequence
gccttttcctcgccgctctc

SEQ ID NO: 6289 - DNA, 20 bp, Artificial
  20-mer unique DNA sequence
accgcggccgtcctactttg

SEQ ID NO: 6290 - DNA, 20 bp, Artificial
  20-mer unique DNA sequence
aacgtcgccgaaacagcacc

SEQ ID NO: 6291 - DNA, 20 bp, Artificial
  20-mer unique DNA sequence
cacacgggtgcattcgcaat

SEQ ID NO: 6292 - DNA, 20 bp, Artificial
  20-mer unique DNA sequence
caaagcctctccacccccct

SEQ ID NO: 6293 - DNA, 20 bp, Artificial
  20-mer unique DNA sequence
gcgcgcacgtgaggtacaag

SEQ ID NO: 6294 - DNA, 20 bp, Artificial
  20-mer unique DNA sequence
gaggatatttggccgctggg

SEQ ID NO: 6295 - DNA, 20 bp, Artificial
  20-mer unique DNA sequence
gcccaggtaccaatgcacag

SEQ ID NO: 6296 - DNA, 20 bp, Artificial
  20-mer unique DNA sequence
gccccgggttatggaagctt

SEQ ID NO: 6297 - DNA, 20 bp, Artificial
  20-mer unique DNA sequence
gctgccggctgggtaacaac

SEQ ID NO: 6298 - DNA, 20 bp, Artificial
  20-mer unique DNA sequence
ctgacacatccgccgcaacg

SEQ ID NO: 6299 - DNA, 20 bp, Artificial
  20-mer unique DNA sequence
ccttggcttggcccgtctct

SEQ ID NO: 6300 - DNA, 20 bp, Artificial
  20-mer unique DNA sequence
gccccagcgcccactatgtt

SEQ ID NO: 6301 - DNA, 20 bp, Artificial
  20-mer unique DNA sequence
tctcgacaccaccaaagcgc

SEQ ID NO: 6302 - DNA, 20 bp, Artificial
  20-mer unique DNA sequence
tcgttgacatgactccccgg

SEQ ID NO: 6303 - DNA, 20 bp, Artificial
  20-mer unique DNA sequence
gaagggtaggccgggtgtcc

SEQ ID NO: 6304 - DNA, 20 bp, Artificial
  20-mer unique DNA sequence
atacgcggccgagttgtact

SEQ ID NO: 6305 - DNA, 20 bp, Artificial
  20-mer unique DNA sequence
gctcagtgcaccggctagtt

SEQ ID NO: 6306 - DNA, 20 bp, Artificial
  20-mer unique DNA sequence
taaatacccgggtgccgctg

SEQ ID NO: 6307 - DNA, 20 bp, Artificial
  20-mer unique DNA sequence
tcgagtgcacccgtagacac

SEQ ID NO: 6308 - DNA, 20 bp, Artificial
  20-mer unique DNA sequence
aggcaagcggcatagggcag

SEQ ID NO: 6309 - DNA, 20 bp, Artificial
  20-mer unique DNA sequence
tgttggagctctttggcggc

SEQ ID NO: 6310 - DNA, 20 bp, Artificial
  20-mer unique DNA sequence
ctagggatgggagcgggcag

SEQ ID NO: 6311 - DNA, 20 bp, Artificial
  20-mer unique DNA sequence
aggttgcggggaagtgttgg

SEQ ID NO: 6312 - DNA, 20 bp, Artificial
  20-mer unique DNA sequence
gccaccctgctttgaccgct

SEQ ID NO: 6313 - DNA, 20 bp, Artificial
  20-mer unique DNA sequence
aaaaatgcgaggacgggggg

SEQ ID NO: 6314 - DNA, 20 bp, Artificial
  20-mer unique DNA sequence
cgctttcccgtcaggtccaa

SEQ ID NO: 6315 - DNA, 20 bp, Artificial
  20-mer unique DNA sequence
ccaagagcaagcgcataacg

SEQ ID NO: 6316 - DNA, 20 bp, Artificial
  20-mer unique DNA sequence
aacgtctcgaatcgggcacc

SEQ ID NO: 6317 - DNA, 20 bp, Artificial
  20-mer unique DNA sequence
ataaactcgcacggacgccg

SEQ ID NO: 6318 - DNA, 20 bp, Artificial
  20-mer unique DNA sequence
caccattcacgttccgccct

SEQ ID NO: 6319 - DNA, 20 bp, Artificial
  20-mer unique DNA sequence
aacggggacacggaaccatc

SEQ ID NO: 6320 - DNA, 20 bp, Artificial
  20-mer unique DNA sequence
cacctagccgcgctaaggtt

SEQ ID NO: 6321 - DNA, 20 bp, Artificial
  20-mer unique DNA sequence
aatcttttgtcgtggggccg

SEQ ID NO: 6322 - DNA, 20 bp, Artificial
  20-mer unique DNA sequence
ggaccgagggcgtgtgaaag

SEQ ID NO: 6323 - DNA, 20 bp, Artificial
  20-mer unique DNA sequence
gctggcttaggggcgtgagt

SEQ ID NO: 6324 - DNA, 20 bp, Artificial
  20-mer unique DNA sequence
actacccgatccgaccaccc

SEQ ID NO: 6325 - DNA, 20 bp, Artificial
  20-mer unique DNA sequence
aacgtacacccgccagcctc

SEQ ID NO: 6326 - DNA, 20 bp, Artificial
  20-mer unique DNA sequence
ttgtggccgtcctttcgttg

SEQ ID NO: 6327 - DNA, 20 bp, Artificial
  20-mer unique DNA sequence
ggacgcgggtgggcttaatt

SEQ ID NO: 6328 - DNA, 20 bp, Artificial
  20-mer unique DNA sequence
cgaccctgcaaagccaaaca

SEQ ID NO: 6329 - DNA, 20 bp, Artificial
  20-mer unique DNA sequence
gaggggctagtgcgggtctg

SEQ ID NO: 6330 - DNA, 20 bp, Artificial
  20-mer unique DNA sequence
ggggcgcgatttttgtgact

SEQ ID NO: 6331 - DNA, 20 bp, Artificial
  20-mer unique DNA sequence
atagggctggcgaggcggag

SEQ ID NO: 6332 - DNA, 20 bp, Artificial
  20-mer unique DNA sequence
cccgccacggatccattcag

SEQ ID NO: 6333 - DNA, 20 bp, Artificial
  20-mer unique DNA sequence
ccaccgatgacctgccttcc

SEQ ID NO: 6334 - DNA, 20 bp, Artificial
  20-mer unique DNA sequence
gaggtcgcggggagttcaag

SEQ ID NO: 6335 - DNA, 20 bp, Artificial
  20-mer unique DNA sequence
gggggcgagggacgagctat

SEQ ID NO: 6336 - DNA, 20 bp, Artificial
  20-mer unique DNA sequence
cttgcggatccatttgcccg

SEQ ID NO: 6337 - DNA, 20 bp, Artificial
  20-mer unique DNA sequence
ccagatctcgagcagccacg

SEQ ID NO: 6338 - DNA, 20 bp, Artificial
  20-mer unique DNA sequence
gcgggaaagaggggcaggat

SEQ ID NO: 6339 - DNA, 20 bp, Artificial
  20-mer unique DNA sequence
cggcttcccaccgacctcct

SEQ ID NO: 6340 - DNA, 20 bp, Artificial
  20-mer unique DNA sequence
tgcccctgctgattttgttc

SEQ ID NO: 6341 - DNA, 20 bp, Artificial
  20-mer unique DNA sequence
caagcgggggtactggggca

SEQ ID NO: 6342 - DNA, 20 bp, Artificial
  20-mer unique DNA sequence
gccagccgatatgttcccgt

SEQ ID NO: 6343 - DNA, 20 bp, Artificial
  20-mer unique DNA sequence
ttggggcacggcgggtaaat

SEQ ID NO: 6344 - DNA, 20 bp, Artificial
  20-mer unique DNA sequence
tttgggggctgtgaggcgaa

SEQ ID NO: 6345 - DNA, 20 bp, Artificial
  20-mer unique DNA sequence
cgagccgcctatcaccacaa

SEQ ID NO: 6346 - DNA, 20 bp, Artificial
  20-mer unique DNA sequence
aagggggcttcgcgtgtctt

SEQ ID NO: 6347 - DNA, 20 bp, Artificial
  20-mer unique DNA sequence
gttggggcacttgagcgagc

SEQ ID NO: 6348 - DNA, 20 bp, Artificial
  20-mer unique DNA sequence
gcccctgggacattgttgga

SEQ ID NO: 6349 - DNA, 20 bp, Artificial
  20-mer unique DNA sequence
tgcctccgctagcgctcaac

SEQ ID NO: 6350 - DNA, 20 bp, Artificial
  20-mer unique DNA sequence
aaaaagtgaagcgctcgggg

SEQ ID NO: 6351 - DNA, 20 bp, Artificial
  20-mer unique DNA sequence
gctctggttgcggtgccata

SEQ ID NO: 6352 - DNA, 20 bp, Artificial
  20-mer unique DNA sequence
agtctcgtgcgcggtttccc

SEQ ID NO: 6353 - DNA, 20 bp, Artificial
  20-mer unique DNA sequence
gtagcggccgcaggggaaaa

SEQ ID NO: 6354 - DNA, 20 bp, Artificial
  20-mer unique DNA sequence
cgcccaaccgccaaatgaag

SEQ ID NO: 6355 - DNA, 20 bp, Artificial
  20-mer unique DNA sequence
ccaacgcacaaacaaaccgc

SEQ ID NO: 6356 - DNA, 20 bp, Artificial
  20-mer unique DNA sequence
gagtcagggatggcggtgga

SEQ ID NO: 6357 - DNA, 20 bp, Artificial
  20-mer unique DNA sequence
acccgaccctacgctaccgc

SEQ ID NO: 6358 - DNA, 20 bp, Artificial
  20-mer unique DNA sequence
gggccccgcaagttacgaat

SEQ ID NO: 6359 - DNA, 20 bp, Artificial
  20-mer unique DNA sequence
gtcactacgaaggccggccc

SEQ ID NO: 6360 - DNA, 20 bp, Artificial
  20-mer unique DNA sequence
tccagccccgtcattatccg

SEQ ID NO: 6361 - DNA, 20 bp, Artificial
  20-mer unique DNA sequence
caatgtaatgaccgcggccg

SEQ ID NO: 6362 - DNA, 20 bp, Artificial
  20-mer unique DNA sequence
cgtcagctcctatgcggtct

SEQ ID NO: 6363 - DNA, 20 bp, Artificial
  20-mer unique DNA sequence
ctgccccctatgacccgcac

SEQ ID NO: 6364 - DNA, 20 bp, Artificial
  20-mer unique DNA sequence
ggatctacgtgggtcgggcc

SEQ ID NO: 6365 - DNA, 20 bp, Artificial
  20-mer unique DNA sequence
cacggcgggaggaataggaa

SEQ ID NO: 6366 - DNA, 20 bp, Artificial
  20-mer unique DNA sequence
atccacccccaaaccctgcc

SEQ ID NO: 6367 - DNA, 20 bp, Artificial
  20-mer unique DNA sequence
ttcggttcggttcaatgggc

SEQ ID NO: 6368 - DNA, 20 bp, Artificial
  20-mer unique DNA sequence
cgggttgggaaagttgagcg

SEQ ID NO: 6369 - DNA, 20 bp, Artificial
  20-mer unique DNA sequence
tcttcagtcccccaggccgt

SEQ ID NO: 6370 - DNA, 20 bp, Artificial
  20-mer unique DNA sequence
tgcttccccccgtcgctaac

SEQ ID NO: 6371 - DNA, 20 bp, Artificial
  20-mer unique DNA sequence
cggtcgttttcgtgcccatt

SEQ ID NO: 6372 - DNA, 20 bp, Artificial
  20-mer unique DNA sequence
caagcagattacagcgcggc

SEQ ID NO: 6373 - DNA, 20 bp, Artificial
  20-mer unique DNA sequence
gcgaaaaacgaccgggggag

SEQ ID NO: 6374 - DNA, 20 bp, Artificial
  20-mer unique DNA sequence
aaatggtgcgatggcgtgct

SEQ ID NO: 6375 - DNA, 20 bp, Artificial
  20-mer unique DNA sequence
tttatcgcctgcccaatccc

SEQ ID NO: 6376 - DNA, 20 bp, Artificial
  20-mer unique DNA sequence
acatccgtgggccctttggc

SEQ ID NO: 6377 - DNA, 20 bp, Artificial
  20-mer unique DNA sequence
tttcggcgctccatgagtca

SEQ ID NO: 6378 - DNA, 20 bp, Artificial
  20-mer unique DNA sequence
caaaagtgtgcccggctgca

SEQ ID NO: 6379 - DNA, 20 bp, Artificial
  20-mer unique DNA sequence
cgagccgttgagatgtccca

SEQ ID NO: 6380 - DNA, 20 bp, Artificial
  20-mer unique DNA sequence
tccaaacgggccatcacgat

SEQ ID NO: 6381 - DNA, 20 bp, Artificial
  20-mer unique DNA sequence
aagtggtgcgtgcgcgtctc

SEQ ID NO: 6382 - DNA, 20 bp, Artificial
  20-mer unique DNA sequence
tccaatacctgctcgggcct

SEQ ID NO: 6383 - DNA, 20 bp, Artificial
  20-mer unique DNA sequence
catcaattcccgcgccagac

SEQ ID NO: 6384 - DNA, 20 bp, Artificial
  20-mer unique DNA sequence
tgccaggtgatgtccgatcc

SEQ ID NO: 6385 - DNA, 20 bp, Artificial
  20-mer unique DNA sequence
gtcgggcttgctgcttttgg

SEQ ID NO: 6386 - DNA, 20 bp, Artificial
  20-mer unique DNA sequence
ccgggagctgtatggatggc

SEQ ID NO: 6387 - DNA, 20 bp, Artificial
  20-mer unique DNA sequence
gcgccgtcttaagcccatgt

SEQ ID NO: 6388 - DNA, 20 bp, Artificial
  20-mer unique DNA sequence
tcctcgactcacattgcgcc

SEQ ID NO: 6389 - DNA, 20 bp, Artificial
  20-mer unique DNA sequence
gccctgcgtcccctaacacc

SEQ ID NO: 6390 - DNA, 20 bp, Artificial
  20-mer unique DNA sequence
tgctgtgtagtgggcgacgg

SEQ ID NO: 6391 - DNA, 20 bp, Artificial
  20-mer unique DNA sequence
tcgaccctgcccaaccaaga

SEQ ID NO: 6392 - DNA, 20 bp, Artificial
  20-mer unique DNA sequence
cgaagtgcgggacagcaggc

SEQ ID NO: 6393 - DNA, 20 bp, Artificial
  20-mer unique DNA sequence
tttccggctgcaaacgctct

SEQ ID NO: 6394 - DNA, 20 bp, Artificial
  20-mer unique DNA sequence
ctccacacgaaacgcgcgac

SEQ ID NO: 6395 - DNA, 20 bp, Artificial
  20-mer unique DNA sequence
tactctcgccgcgctcatcc

SEQ ID NO: 6396 - DNA, 20 bp, Artificial
  20-mer unique DNA sequence
gggtctggttccggggtcga

SEQ ID NO: 6397 - DNA, 20 bp, Artificial
  20-mer unique DNA sequence
ccccgctggcccaattcttc

SEQ ID NO: 6398 - DNA, 20 bp, Artificial
  20-mer unique DNA sequence
ttcccgtgctcggaccatag

SEQ ID NO: 6399 - DNA, 20 bp, Artificial
  20-mer unique DNA sequence
aacgtaggagatgggccggc

SEQ ID NO: 6400 - DNA, 20 bp, Artificial
  20-mer unique DNA sequence
aaccgttcgctcccatcctg

SEQ ID NO: 6401 - DNA, 20 bp, Artificial
  20-mer unique DNA sequence
cccctcggcgatagctccac

SEQ ID NO: 6402 - DNA, 20 bp, Artificial
  20-mer unique DNA sequence
ccgagtcacgcccacgagtc

SEQ ID NO: 6403 - DNA, 20 bp, Artificial
  20-mer unique DNA sequence
tcgattaggtcggccggtcg

SEQ ID NO: 6404 - DNA, 20 bp, Artificial
  20-mer unique DNA sequence
taacaccctctcgcgcctgg

SEQ ID NO: 6405 - DNA, 20 bp, Artificial
  20-mer unique DNA sequence
tgaggataaccggtgggcgt

SEQ ID NO: 6406 - DNA, 20 bp, Artificial
  20-mer unique DNA sequence
caagaggtgtgtgcgggggc

SEQ ID NO: 6407 - DNA, 20 bp, Artificial
  20-mer unique DNA sequence
cgggcaggaagggaaggtcg

SEQ ID NO: 6408 - DNA, 20 bp, Artificial
  20-mer unique DNA sequence
tccagggcccgcttaccagc

SEQ ID NO: 6409 - DNA, 20 bp, Artificial
  20-mer unique DNA sequence
tagcgcagccccctcaaaaa

SEQ ID NO: 6410 - DNA, 20 bp, Artificial
  20-mer unique DNA sequence
agcggacgctagtgctggat

SEQ ID NO: 6411 - DNA, 20 bp, Artificial
  20-mer unique DNA sequence
tacgccgtgcgctatgaaca

SEQ ID NO: 6412 - DNA, 20 bp, Artificial
  20-mer unique DNA sequence
agcaggcgcgacaggttggt

SEQ ID NO: 6413 - DNA, 20 bp, Artificial
  20-mer unique DNA sequence
gtaaggcgggcagcaaggtg

SEQ ID NO: 6414 - DNA, 20 bp, Artificial
  20-mer unique DNA sequence
gcagcgtgccgcctatctct

SEQ ID NO: 6415 - DNA, 20 bp, Artificial
  20-mer unique DNA sequence
ctttcccctatcgggcgtgc

SEQ ID NO: 6416 - DNA, 20 bp, Artificial
  20-mer unique DNA sequence
actaaacccgccgcactcga

SEQ ID NO: 6417 - DNA, 20 bp, Artificial
  20-mer unique DNA sequence
gactttcggctcggcgggtt

SEQ ID NO: 6418 - DNA, 20 bp, Artificial
  20-mer unique DNA sequence
ggcagatgtggcggtgacgt

SEQ ID NO: 6419 - DNA, 20 bp, Artificial
  20-mer unique DNA sequence
acaaatccgttgccgtgcgt

SEQ ID NO: 6420 - DNA, 20 bp, Artificial
  20-mer unique DNA sequence
tttcccggtgcgcgttttga

SEQ ID NO: 6421 - DNA, 20 bp, Artificial
  20-mer unique DNA sequence
ttggtgggctttgggcatcg

SEQ ID NO: 6422 - DNA, 20 bp, Artificial
  20-mer unique DNA sequence
gtcgggcgtgcctgggtaat

SEQ ID NO: 6423 - DNA, 20 bp, Artificial
  20-mer unique DNA sequence
ccctttcttgccatgccccc

SEQ ID NO: 6424 - DNA, 20 bp, Artificial
  20-mer unique DNA sequence
acatcaaggccccaacaggg

SEQ ID NO: 6425 - DNA, 20 bp, Artificial
  20-mer unique DNA sequence
tcaccttgacctcgctcccc

SEQ ID NO: 6426 - DNA, 20 bp, Artificial
  20-mer unique DNA sequence
aggtctcgaaagccgcgcgt

SEQ ID NO: 6427 - DNA, 20 bp, Artificial
  20-mer unique DNA sequence
acgttttgggttggttggcc

SEQ ID NO: 6428 - DNA, 20 bp, Artificial
  20-mer unique DNA sequence
tacgaattgaggcgccggaa

SEQ ID NO: 6429 - DNA, 20 bp, Artificial
  20-mer unique DNA sequence
tgggcacgcgagggtaactg

SEQ ID NO: 6430 - DNA, 20 bp, Artificial
  20-mer unique DNA sequence
acggccaattttccctgcac

SEQ ID NO: 6431 - DNA, 20 bp, Artificial
  20-mer unique DNA sequence
aaacgcgccagccactcttg

SEQ ID NO: 6432 - DNA, 20 bp, Artificial
  20-mer unique DNA sequence
ccataacttggcccatgccg

SEQ ID NO: 6433 - DNA, 20 bp, Artificial
  20-mer unique DNA sequence
gggctccggctcacacttat

SEQ ID NO: 6434 - DNA, 20 bp, Artificial
  20-mer unique DNA sequence
gagtcttgcgtgggtggctg

SEQ ID NO: 6435 - DNA, 20 bp, Artificial
  20-mer unique DNA sequence
cgcccaactcccgcactcta

SEQ ID NO: 6436 - DNA, 20 bp, Artificial
  20-mer unique DNA sequence
cgtgggcgtaacaatccgga

SEQ ID NO: 6437 - DNA, 20 bp, Artificial
  20-mer unique DNA sequence
tgaaacttaccccggcgacg

SEQ ID NO: 6438 - DNA, 20 bp, Artificial
  20-mer unique DNA sequence
tcacatcgctgtagaggcca

SEQ ID NO: 6439 - DNA, 20 bp, Artificial
  20-mer unique DNA sequence
gccaatctagcgcggaccca

SEQ ID NO: 6440 - DNA, 20 bp, Artificial
  20-mer unique DNA sequence
tcggggcattctggtgggtg

SEQ ID NO: 6441 - DNA, 20 bp, Artificial
  20-mer unique DNA sequence
ccaaaaagccccttcccacc

SEQ ID NO: 6442 - DNA, 20 bp, Artificial
  20-mer unique DNA sequence
taccccgtggtttctgcgga

SEQ ID NO: 6443 - DNA, 20 bp, Artificial
  20-mer unique DNA sequence
aggcgcgcgaacatacgtca

SEQ ID NO: 6444 - DNA, 20 bp, Artificial
  20-mer unique DNA sequence
atgtaacccgcgtaccgtgc

SEQ ID NO: 6445 - DNA, 20 bp, Artificial
  20-mer unique DNA sequence
actacacggggcgcgtaaat

SEQ ID NO: 6446 - DNA, 20 bp, Artificial
  20-mer unique DNA sequence
gacaacacccacacgcggga

SEQ ID NO: 6447 - DNA, 20 bp, Artificial
  20-mer unique DNA sequence
tacgtgtgccgcgtggcttt

SEQ ID NO: 6448 - DNA, 20 bp, Artificial
  20-mer unique DNA sequence
tccatctcgctcaccatccg

SEQ ID NO: 6449 - DNA, 20 bp, Artificial
  20-mer unique DNA sequence
gcgggaagcgaactgcgaag

SEQ ID NO: 6450 - DNA, 20 bp, Artificial
  20-mer unique DNA sequence
cgctggcgatccgatatgaa

SEQ ID NO: 6451 - DNA, 20 bp, Artificial
  20-mer unique DNA sequence
aattggagtttggtgcgcgc

SEQ ID NO: 6452 - DNA, 20 bp, Artificial
  20-mer unique DNA sequence
cggtctcccccccagaaagg

SEQ ID NO: 6453 - DNA, 20 bp, Artificial
  20-mer unique DNA sequence
cccgccatcacccagaatcc

SEQ ID NO: 6454 - DNA, 20 bp, Artificial
  20-mer unique DNA sequence
aagcccatccgcaaccatcc

SEQ ID NO: 6455 - DNA, 20 bp, Artificial
  20-mer unique DNA sequence
ctgctgcgggggctaaaatg

SEQ ID NO: 6456 - DNA, 20 bp, Artificial
  20-mer unique DNA sequence
gtctcggcacgcaattcagc

SEQ ID NO: 6457 - DNA, 20 bp, Artificial
  20-mer unique DNA sequence
tacggggcgcacaatctacg

SEQ ID NO: 6458 - DNA, 20 bp, Artificial
  20-mer unique DNA sequence
gacctccgcctgctcccact

SEQ ID NO: 6459 - DNA, 20 bp, Artificial
  20-mer unique DNA sequence
tcccctacctggccgttttg

SEQ ID NO: 6460 - DNA, 20 bp, Artificial
  20-mer unique DNA sequence
atcaccctgccacgctccat

SEQ ID NO: 6461 - DNA, 20 bp, Artificial
  20-mer unique DNA sequence
accacctcatgccacgtccg

SEQ ID NO: 6462 - DNA, 20 bp, Artificial
  20-mer unique DNA sequence
atgaagcgtgcctgtagggc

SEQ ID NO: 6463 - DNA, 20 bp, Artificial
  20-mer unique DNA sequence
tccgacgcgtgtgatcagga

SEQ ID NO: 6464 - DNA, 20 bp, Artificial
  20-mer unique DNA sequence
agaatgcgccgtagtgggga

SEQ ID NO: 6465 - DNA, 20 bp, Artificial
  20-mer unique DNA sequence
agacgctcattcccccgcag

SEQ ID NO: 6466 - DNA, 20 bp, Artificial
  20-mer unique DNA sequence
ttcggcgtctcatgggttcc

SEQ ID NO: 6467 - DNA, 20 bp, Artificial
  20-mer unique DNA sequence
ccaccgcgcctattgaacca

SEQ ID NO: 6468 - DNA, 20 bp, Artificial
  20-mer unique DNA sequence
cgctccatccaaaccgtcaa

SEQ ID NO: 6469 - DNA, 20 bp, Artificial
  20-mer unique DNA sequence
agaagctgcatgtgggcgca

SEQ ID NO: 6470 - DNA, 20 bp, Artificial
  20-mer unique DNA sequence
atgttagggggggcgtgggt

SEQ ID NO: 6471 - DNA, 20 bp, Artificial
  20-mer unique DNA sequence
cagcccccaacctcactgct

SEQ ID NO: 6472 - DNA, 20 bp, Artificial
  20-mer unique DNA sequence
ctgcaatggggggcactacc

SEQ ID NO: 6473 - DNA, 20 bp, Artificial
  20-mer unique DNA sequence
ctcaaatcccaaccccaccg

SEQ ID NO: 6474 - DNA, 20 bp, Artificial
  20-mer unique DNA sequence
ctcgcagcacacccccttca

SEQ ID NO: 6475 - DNA, 20 bp, Artificial
  20-mer unique DNA sequence
ataagagtggtcgccggggg

SEQ ID NO: 6476 - DNA, 20 bp, Artificial
  20-mer unique DNA sequence
cttcgggaggcaataggggg

SEQ ID NO: 6477 - DNA, 20 bp, Artificial
  20-mer unique DNA sequence
ctctggggggcatatgtggg

SEQ ID NO: 6478 - DNA, 20 bp, Artificial
  20-mer unique DNA sequence
atagctgatctgcggggcgg

SEQ ID NO: 6479 - DNA, 20 bp, Artificial
  20-mer unique DNA sequence
atgggcgcacaactcgaagc

SEQ ID NO: 6480 - DNA, 20 bp, Artificial
  20-mer unique DNA sequence
aaacccggccctgaaccatg

SEQ ID NO: 6481 - DNA, 20 bp, Artificial
  20-mer unique DNA sequence
ttggcggttgctctttggga

SEQ ID NO: 6482 - DNA, 20 bp, Artificial
  20-mer unique DNA sequence
gcgcgtgttttgctttgggg

SEQ ID NO: 6483 - DNA, 20 bp, Artificial
  20-mer unique DNA sequence
cggggaataggaaggagcgg

SEQ ID NO: 6484 - DNA, 20 bp, Artificial
  20-mer unique DNA sequence
agcctgcgtggaataagccg

SEQ ID NO: 6485 - DNA, 20 bp, Artificial
  20-mer unique DNA sequence
gatctggaggcgctggttgc

SEQ ID NO: 6486 - DNA, 20 bp, Artificial
  20-mer unique DNA sequence
cggcccacccccttgatcat

SEQ ID NO: 6487 - DNA, 20 bp, Artificial
  20-mer unique DNA sequence
cggcttcggtcgggttgatg

SEQ ID NO: 6488 - DNA, 20 bp, Artificial
  20-mer unique DNA sequence
tgaaggctgatgggcggtcc

SEQ ID NO: 6489 - DNA, 20 bp, Artificial
  20-mer unique DNA sequence
gggttcttgttgtccggggg

SEQ ID NO: 6490 - DNA, 20 bp, Artificial
  20-mer unique DNA sequence
agaccaccaggctgaaccga

SEQ ID NO: 6491 - DNA, 20 bp, Artificial
  20-mer unique DNA sequence
aggtcggactcatgtcacgc

SEQ ID NO: 6492 - DNA, 20 bp, Artificial
  20-mer unique DNA sequence
ttggcctgcagctagtctgg

SEQ ID NO: 6493 - DNA, 20 bp, Artificial
  20-mer unique DNA sequence
cacgcgatctagggtgagca

SEQ ID NO: 6494 - DNA, 20 bp, Artificial
  20-mer unique DNA sequence
ccgcaaccccatgaatgatg

SEQ ID NO: 6495 - DNA, 20 bp, Artificial
  20-mer unique DNA sequence
gccctggggttggggttaag

SEQ ID NO: 6496 - DNA, 20 bp, Artificial
  20-mer unique DNA sequence
cgactcccacgtgtgcccat

SEQ ID NO: 6497 - DNA, 20 bp, Artificial
  20-mer unique DNA sequence
tgcgcctcggtttcttctcc

SEQ ID NO: 6498 - DNA, 20 bp, Artificial
  20-mer unique DNA sequence
tggtgaagagggtacgcccg

SEQ ID NO: 6499 - DNA, 20 bp, Artificial
  20-mer unique DNA sequence
gagcaaatgaacgcgaggcg

SEQ ID NO: 6500 - DNA, 20 bp, Artificial
  20-mer unique DNA sequence
ccaaagactctgctcccgac

SEQ ID NO: 6501 - DNA, 20 bp, Artificial
  20-mer unique DNA sequence
acgcacaatccgaaaccccc

SEQ ID NO: 6502 - DNA, 20 bp, Artificial
  20-mer unique DNA sequence
gcgttgttccggaggcgtag

SEQ ID NO: 6503 - DNA, 20 bp, Artificial
  20-mer unique DNA sequence
gcggggaggaccaagaatga

SEQ ID NO: 6504 - DNA, 20 bp, Artificial
  20-mer unique DNA sequence
tggtaggagcgtgggggtga

SEQ ID NO: 6505 - DNA, 20 bp, Artificial
  20-mer unique DNA sequence
tgggcagatttgggcgagct

SEQ ID NO: 6506 - DNA, 20 bp, Artificial
  20-mer unique DNA sequence
cctgttcgccccttgcctcc

SEQ ID NO: 6507 - DNA, 20 bp, Artificial
  20-mer unique DNA sequence
cggcgggatgatgggatgac

SEQ ID NO: 6508 - DNA, 20 bp, Artificial
  20-mer unique DNA sequence
tccgcgcgttggccctatta

SEQ ID NO: 6509 - DNA, 20 bp, Artificial
  20-mer unique DNA sequence
gcgggggcttggattggtgt

SEQ ID NO: 6510 - DNA, 20 bp, Artificial
  20-mer unique DNA sequence
cgcgacgtttacccagtcct

SEQ ID NO: 6511 - DNA, 20 bp, Artificial
  20-mer unique DNA sequence
agaaccgcgacaggaacgca

SEQ ID NO: 6512 - DNA, 20 bp, Artificial
  20-mer unique DNA sequence
actgggcccggagcattacg

SEQ ID NO: 6513 - DNA, 20 bp, Artificial
  20-mer unique DNA sequence
ctccaaagcactgccgccgg

SEQ ID NO: 6514 - DNA, 20 bp, Artificial
  20-mer unique DNA sequence
tgtcctacgccctttcgcct

SEQ ID NO: 6515 - DNA, 20 bp, Artificial
  20-mer unique DNA sequence
ttttttttcggcttgcggct

SEQ ID NO: 6516 - DNA, 20 bp, Artificial
  20-mer unique DNA sequence
gagcgtgggcggagtggata

SEQ ID NO: 6517 - DNA, 20 bp, Artificial
  20-mer unique DNA sequence
tagccccaatcgcgaacacg

SEQ ID NO: 6518 - DNA, 20 bp, Artificial
  20-mer unique DNA sequence
gggcatgcgatcgaagggag

SEQ ID NO: 6519 - DNA, 20 bp, Artificial
  20-mer unique DNA sequence
acaatgggccggcagacagc

SEQ ID NO: 6520 - DNA, 20 bp, Artificial
  20-mer unique DNA sequence
tagcttgtcgggaggggcgt

SEQ ID NO: 6521 - DNA, 20 bp, Artificial
  20-mer unique DNA sequence
acgtggccggggttttcctc

SEQ ID NO: 6522 - DNA, 20 bp, Artificial
  20-mer unique DNA sequence
ccttggctcccatcgctttg

SEQ ID NO: 6523 - DNA, 20 bp, Artificial
  20-mer unique DNA sequence
gagggtcgtgggggtgctct

SEQ ID NO: 6524 - DNA, 20 bp, Artificial
  20-mer unique DNA sequence
ccagcaaccgccccaaatag

SEQ ID NO: 6525 - DNA, 20 bp, Artificial
  20-mer unique DNA sequence
caatgacggctgggcaagaa

SEQ ID NO: 6526 - DNA, 20 bp, Artificial
  20-mer unique DNA sequence
acccgtttgcatccctccct

SEQ ID NO: 6527 - DNA, 20 bp, Artificial
  20-mer unique DNA sequence
tgctcgccaattgatcgtcc

SEQ ID NO: 6528 - DNA, 20 bp, Artificial
  20-mer unique DNA sequence
ctcccgcaccagaaccgtcc

SEQ ID NO: 6529 - DNA, 20 bp, Artificial
  20-mer unique DNA sequence
tacaagtcgtggtcggggcc

SEQ ID NO: 6530 - DNA, 20 bp, Artificial
  20-mer unique DNA sequence
gggcagcgggaagcaattaa

SEQ ID NO: 6531 - DNA, 20 bp, Artificial
  20-mer unique DNA sequence
ggcatgaccctaactcggcg

SEQ ID NO: 6532 - DNA, 20 bp, Artificial
  20-mer unique DNA sequence
cctaaggggcgagaccggtc

SEQ ID NO: 6533 - DNA, 20 bp, Artificial
  20-mer unique DNA sequence
agcgcggccatcctagacat

SEQ ID NO: 6534 - DNA, 20 bp, Artificial
  20-mer unique DNA sequence
cctccaccccacactccgtt

SEQ ID NO: 6535 - DNA, 20 bp, Artificial
  20-mer unique DNA sequence
ggtaattgatggcgggctgg

SEQ ID NO: 6536 - DNA, 20 bp, Artificial
  20-mer unique DNA sequence
gacttatggacggcaccgcg

SEQ ID NO: 6537 - DNA, 20 bp, Artificial
  20-mer unique DNA sequence
ccttggtggcgggtctgtca

SEQ ID NO: 6538 - DNA, 20 bp, Artificial
  20-mer unique DNA sequence
tgcgcataccaaccggaaca

SEQ ID NO: 6539 - DNA, 20 bp, Artificial
  20-mer unique DNA sequence
gctttgcttggcggggttta

SEQ ID NO: 6540 - DNA, 20 bp, Artificial
  20-mer unique DNA sequence
cagccacactaaagcgccga

SEQ ID NO: 6541 - DNA, 20 bp, Artificial
  20-mer unique DNA sequence
cacacctcgggcgcctttaa

SEQ ID NO: 6542 - DNA, 20 bp, Artificial
  20-mer unique DNA sequence
accccgctttcaatccgtcg

SEQ ID NO: 6543 - DNA, 20 bp, Artificial
  20-mer unique DNA sequence
aactcctcccggtctcgcaa

SEQ ID NO: 6544 - DNA, 20 bp, Artificial
  20-mer unique DNA sequence
agcccaaacgtagcacccgc

SEQ ID NO: 6545 - DNA, 20 bp, Artificial
  20-mer unique DNA sequence
ttctgatagggggaggcgca

SEQ ID NO: 6546 - DNA, 20 bp, Artificial
  20-mer unique DNA sequence
gttcatgcccgtttcgccca

SEQ ID NO: 6547 - DNA, 20 bp, Artificial
  20-mer unique DNA sequence
acctcccctcaagttccgcc

SEQ ID NO: 6548 - DNA, 20 bp, Artificial
  20-mer unique DNA sequence
tccacgcaaaacctcgcctt

SEQ ID NO: 6549 - DNA, 20 bp, Artificial
  20-mer unique DNA sequence
cggaatacgctgggagtgca

SEQ ID NO: 6550 - DNA, 20 bp, Artificial
  20-mer unique DNA sequence
agtgttgcgaggcggaggaa

SEQ ID NO: 6551 - DNA, 20 bp, Artificial
  20-mer unique DNA sequence
tcacctttttgtggggcggt

SEQ ID NO: 6552 - DNA, 20 bp, Artificial
  20-mer unique DNA sequence
ttaccgcccggccactctca

SEQ ID NO: 6553 - DNA, 20 bp, Artificial
  20-mer unique DNA sequence
tttgtccattccccgagcct

SEQ ID NO: 6554 - DNA, 20 bp, Artificial
  20-mer unique DNA sequence
gcgagtaaagccccgattgg

SEQ ID NO: 6555 - DNA, 20 bp, Artificial
  20-mer unique DNA sequence
ggagctatggcgacttgggg

SEQ ID NO: 6556 - DNA, 20 bp, Artificial
  20-mer unique DNA sequence
ccagccacgttttccccctt

SEQ ID NO: 6557 - DNA, 20 bp, Artificial
  20-mer unique DNA sequence
cacgcgcacctttccacact

SEQ ID NO: 6558 - DNA, 20 bp, Artificial
  20-mer unique DNA sequence
ttctcgctgctcgcttccgt

SEQ ID NO: 6559 - DNA, 20 bp, Artificial
  20-mer unique DNA sequence
ctcggctccctcccgtgtta

SEQ ID NO: 6560 - DNA, 20 bp, Artificial
  20-mer unique DNA sequence
acggtgatagagacgggcgc

SEQ ID NO: 6561 - DNA, 20 bp, Artificial
  20-mer unique DNA sequence
tggccggacgaggtaatgga

SEQ ID NO: 6562 - DNA, 20 bp, Artificial
  20-mer unique DNA sequence
ctgcctgccccactctcggt

SEQ ID NO: 6563 - DNA, 20 bp, Artificial
  20-mer unique DNA sequence
gctgcgtggaggggggtagt

SEQ ID NO: 6564 - DNA, 20 bp, Artificial
  20-mer unique DNA sequence
gtgtgcgtgctggggatgtg

SEQ ID NO: 6565 - DNA, 20 bp, Artificial
  20-mer unique DNA sequence
gaggcaacggacgcgaagaa

SEQ ID NO: 6566 - DNA, 20 bp, Artificial
  20-mer unique DNA sequence
gaagcggcaagacgacaggc

SEQ ID NO: 6567 - DNA, 20 bp, Artificial
  20-mer unique DNA sequence
aagtcgaactggaacgaggc

SEQ ID NO: 6568 - DNA, 20 bp, Artificial
  20-mer unique DNA sequence
cccgatacccccccacgtct

SEQ ID NO: 6569 - DNA, 20 bp, Artificial
  20-mer unique DNA sequence
tccgcccccaaaccctactc

SEQ ID NO: 6570 - DNA, 20 bp, Artificial
  20-mer unique DNA sequence
atgatgaaggcccacccgcc

SEQ ID NO: 6571 - DNA, 20 bp, Artificial
  20-mer unique DNA sequence
acctgtcacccgctgccctc

SEQ ID NO: 6572 - DNA, 20 bp, Artificial
  20-mer unique DNA sequence
gccaatatgtgccctcccgc

SEQ ID NO: 6573 - DNA, 20 bp, Artificial
  20-mer unique DNA sequence
ggaccgcgagtatgcatgcg

SEQ ID NO: 6574 - DNA, 20 bp, Artificial
  20-mer unique DNA sequence
cgttccgctgctcgtggctg

SEQ ID NO: 6575 - DNA, 20 bp, Artificial
  20-mer unique DNA sequence
actgatatgcccccgtcccc

SEQ ID NO: 6576 - DNA, 20 bp, Artificial
  20-mer unique DNA sequence
ggcaacaaacgcgacatggc

SEQ ID NO: 6577 - DNA, 20 bp, Artificial
  20-mer unique DNA sequence
cctgcttgttccgtcccaca

SEQ ID NO: 6578 - DNA, 20 bp, Artificial
  20-mer unique DNA sequence
cgcttaagccgtttggcgaa

SEQ ID NO: 6579 - DNA, 20 bp, Artificial
  20-mer unique DNA sequence
cgattaatgccccgttccca

SEQ ID NO: 6580 - DNA, 20 bp, Artificial
  20-mer unique DNA sequence
aattgaacagaccccccgcc

SEQ ID NO: 6581 - DNA, 20 bp, Artificial
  20-mer unique DNA sequence
tttcccagcacagacccgag

SEQ ID NO: 6582 - DNA, 20 bp, Artificial
  20-mer unique DNA sequence
tccaccgccactccagcaat

SEQ ID NO: 6583 - DNA, 20 bp, Artificial
  20-mer unique DNA sequence
gcgggttgtggctttgctgc

SEQ ID NO: 6584 - DNA, 20 bp, Artificial
  20-mer unique DNA sequence
ccgcaaacaaggaccagggg

SEQ ID NO: 6585 - DNA, 20 bp, Artificial
  20-mer unique DNA sequence
gccatctcgtgccgcgttaa

SEQ ID NO: 6586 - DNA, 20 bp, Artificial
  20-mer unique DNA sequence
cgttaggactgcgtgggctg

SEQ ID NO: 6587 - DNA, 20 bp, Artificial
  20-mer unique DNA sequence
tgggagcggcatgttggaag

SEQ ID NO: 6588 - DNA, 20 bp, Artificial
  20-mer unique DNA sequence
ccaaagcagcaaaggggcac

SEQ ID NO: 6589 - DNA, 20 bp, Artificial
  20-mer unique DNA sequence
atgggcagttggtgaggcgc

SEQ ID NO: 6590 - DNA, 20 bp, Artificial
  20-mer unique DNA sequence
tcactcatcccagcacgccg

SEQ ID NO: 6591 - DNA, 20 bp, Artificial
  20-mer unique DNA sequence
caagaccaggggccgttcac

SEQ ID NO: 6592 - DNA, 20 bp, Artificial
  20-mer unique DNA sequence
gtgttttgcggctccagggt

SEQ ID NO: 6593 - DNA, 20 bp, Artificial
  20-mer unique DNA sequence
cccatacgcacctccgaccg

SEQ ID NO: 6594 - DNA, 20 bp, Artificial
  20-mer unique DNA sequence
gacgacggtgtacgggtaga

SEQ ID NO: 6595 - DNA, 20 bp, Artificial
  20-mer unique DNA sequence
agaaggtgggcaacggcgaa

SEQ ID NO: 6596 - DNA, 20 bp, Artificial
  20-mer unique DNA sequence
cgacgcaagacggggaacag

SEQ ID NO: 6597 - DNA, 20 bp, Artificial
  20-mer unique DNA sequence
cccctggtcttcgcgtgcta

SEQ ID NO: 6598 - DNA, 20 bp, Artificial
  20-mer unique DNA sequence
atcacgctcccaagatcccg

SEQ ID NO: 6599 - DNA, 20 bp, Artificial
  20-mer unique DNA sequence
ccccaaatcgatcgctcctg

SEQ ID NO: 6600 - DNA, 20 bp, Artificial
  20-mer unique DNA sequence
aacttggtgcgtggcgggac

SEQ ID NO: 6601 - DNA, 20 bp, Artificial
  20-mer unique DNA sequence
cgccaaatccgctccagtgt

SEQ ID NO: 6602 - DNA, 20 bp, Artificial
  20-mer unique DNA sequence
aaggtcccagccccccgaag

SEQ ID NO: 6603 - DNA, 20 bp, Artificial
  20-mer unique DNA sequence
caggaaaccccgacacgatg

SEQ ID NO: 6604 - DNA, 20 bp, Artificial
  20-mer unique DNA sequence
tccagcccctgttgcctccc

SEQ ID NO: 6605 - DNA, 20 bp, Artificial
  20-mer unique DNA sequence
gccgcgaagtggacgcttat

SEQ ID NO: 6606 - DNA, 20 bp, Artificial
  20-mer unique DNA sequence
gcacgtcatcgggcattacg

SEQ ID NO: 6607 - DNA, 20 bp, Artificial
  20-mer unique DNA sequence
catgcacactaggccacgga

SEQ ID NO: 6608 - DNA, 20 bp, Artificial
  20-mer unique DNA sequence
atgagacctaaccgcccccg

SEQ ID NO: 6609 - DNA, 20 bp, Artificial
  20-mer unique DNA sequence
ccttccaccccctgacgatg

SEQ ID NO: 6610 - DNA, 20 bp, Artificial
  20-mer unique DNA sequence
aaccgaaaggaaggcgggag

SEQ ID NO: 6611 - DNA, 20 bp, Artificial
  20-mer unique DNA sequence
tgccctaggtgctagatgcg

SEQ ID NO: 6612 - DNA, 20 bp, Artificial
  20-mer unique DNA sequence
tccgggccttttcgatcttg

SEQ ID NO: 6613 - DNA, 20 bp, Artificial
  20-mer unique DNA sequence
aggtgcgcggtttccatgat

SEQ ID NO: 6614 - DNA, 20 bp, Artificial
  20-mer unique DNA sequence
tttttgcaggagggcgcttt

SEQ ID NO: 6615 - DNA, 20 bp, Artificial
  20-mer unique DNA sequence
cgggtcttaggcgtggggga

SEQ ID NO: 6616 - DNA, 20 bp, Artificial
  20-mer unique DNA sequence
gattgagtgggggtggcgac

SEQ ID NO: 6617 - DNA, 20 bp, Artificial
  20-mer unique DNA sequence
tgcaaagggatcccgggagg

SEQ ID NO: 6618 - DNA, 20 bp, Artificial
  20-mer unique DNA sequence
cagttcacgatgggcgagca

SEQ ID NO: 6619 - DNA, 20 bp, Artificial
  20-mer unique DNA sequence
tcccgcatccccttgcacat

SEQ ID NO: 6620 - DNA, 20 bp, Artificial
  20-mer unique DNA sequence
cgcgtggtggagttctttgt

SEQ ID NO: 6621 - DNA, 20 bp, Artificial
  20-mer unique DNA sequence
gtcggggatgttcgggattg

SEQ ID NO: 6622 - DNA, 20 bp, Artificial
  20-mer unique DNA sequence
agacgggcctttgttgctga

SEQ ID NO: 6623 - DNA, 20 bp, Artificial
  20-mer unique DNA sequence
aacattcgaaaccgcccccg

SEQ ID NO: 6624 - DNA, 20 bp, Artificial
  20-mer unique DNA sequence
cgtgatcccgaagcaacccg

SEQ ID NO: 6625 - DNA, 20 bp, Artificial
  20-mer unique DNA sequence
gccctgtcttgacttccgcc

SEQ ID NO: 6626 - DNA, 20 bp, Artificial
  20-mer unique DNA sequence
catcgggtagaaggcggctg

SEQ ID NO: 6627 - DNA, 20 bp, Artificial
  20-mer unique DNA sequence
gccctcctgcccaatccatc

SEQ ID NO: 6628 - DNA, 20 bp, Artificial
  20-mer unique DNA sequence
gacgcccccgcaaagatagg

SEQ ID NO: 6629 - DNA, 20 bp, Artificial
  20-mer unique DNA sequence
gaaagcccaaagctcacccg

SEQ ID NO: 6630 - DNA, 20 bp, Artificial
  20-mer unique DNA sequence
attgcccccatagtccgccc

SEQ ID NO: 6631 - DNA, 20 bp, Artificial
  20-mer unique DNA sequence
ttaggcgggattggcggaaa

SEQ ID NO: 6632 - DNA, 20 bp, Artificial
  20-mer unique DNA sequence
gtcggtcgtggggggtcaat

SEQ ID NO: 6633 - DNA, 20 bp, Artificial
  20-mer unique DNA sequence
gcaaggaaggagggggggtg

SEQ ID NO: 6634 - DNA, 20 bp, Artificial
  20-mer unique DNA sequence
aacatcccgccccactgaag

SEQ ID NO: 6635 - DNA, 20 bp, Artificial
  20-mer unique DNA sequence
accttcgcggccccttgttg

SEQ ID NO: 6636 - DNA, 20 bp, Artificial
  20-mer unique DNA sequence
taaaccgccgcaaaaccgca

SEQ ID NO: 6637 - DNA, 20 bp, Artificial
  20-mer unique DNA sequence
ttgttgttctggtcgggccc

SEQ ID NO: 6638 - DNA, 20 bp, Artificial
  20-mer unique DNA sequence
ctgttgcccgattagcccga

SEQ ID NO: 6639 - DNA, 20 bp, Artificial
  20-mer unique DNA sequence
cacgtccaggccaataccgc

SEQ ID NO: 6640 - DNA, 20 bp, Artificial
  20-mer unique DNA sequence
tggcgacggggatgaactga

SEQ ID NO: 6641 - DNA, 20 bp, Artificial
  20-mer unique DNA sequence
atgcgaaacccgatgaacgc

SEQ ID NO: 6642 - DNA, 20 bp, Artificial
  20-mer unique DNA sequence
acgggcgaggaacgaacgac

SEQ ID NO: 6643 - DNA, 20 bp, Artificial
  20-mer unique DNA sequence
ctgcgggtgaacttttggcg

SEQ ID NO: 6644 - DNA, 20 bp, Artificial
  20-mer unique DNA sequence
ggaggtggaggacatggcgt

SEQ ID NO: 6645 - DNA, 20 bp, Artificial
  20-mer unique DNA sequence
gggctgttggggcgactgat

SEQ ID NO: 6646 - DNA, 20 bp, Artificial
  20-mer unique DNA sequence
gatgcggggtgccaaggaga

SEQ ID NO: 6647 - DNA, 20 bp, Artificial
  20-mer unique DNA sequence
cccatccgcccacccaaagt

SEQ ID NO: 6648 - DNA, 20 bp, Artificial
  20-mer unique DNA sequence
cgacatcaggcgcccacaac

SEQ ID NO: 6649 - DNA, 20 bp, Artificial
  20-mer unique DNA sequence
agccatacacccgacgaccg

SEQ ID NO: 6650 - DNA, 20 bp, Artificial
  20-mer unique DNA sequence
cctcgcaatccgcaaagaca

SEQ ID NO: 6651 - DNA, 20 bp, Artificial
  20-mer unique DNA sequence
tgcgatgcggtttcaggttg

SEQ ID NO: 6652 - DNA, 20 bp, Artificial
  20-mer unique DNA sequence
tccgctcccccatccttaag

SEQ ID NO: 6653 - DNA, 20 bp, Artificial
  20-mer unique DNA sequence
ttgggaagcggacgacgagg

SEQ ID NO: 6654 - DNA, 20 bp, Artificial
  20-mer unique DNA sequence
cgccagaggtacagcggagg

SEQ ID NO: 6655 - DNA, 20 bp, Artificial
  20-mer unique DNA sequence
agacttccccatgccccgcg

SEQ ID NO: 6656 - DNA, 20 bp, Artificial
  20-mer unique DNA sequence
ccgcgccacgactaaaggct

SEQ ID NO: 6657 - DNA, 20 bp, Artificial
  20-mer unique DNA sequence
ccacaatcggacgcgagcat

SEQ ID NO: 6658 - DNA, 20 bp, Artificial
  20-mer unique DNA sequence
acactggcgggaggagcatt

SEQ ID NO: 6659 - DNA, 20 bp, Artificial
  20-mer unique DNA sequence
gccgggactgaagggtgcat

SEQ ID NO: 6660 - DNA, 20 bp, Artificial
  20-mer unique DNA sequence
cccggtcgtaagtggcatgc

SEQ ID NO: 6661 - DNA, 20 bp, Artificial
  20-mer unique DNA sequence
cgacgctagaaggatagcga

SEQ ID NO: 6662 - DNA, 20 bp, Artificial
  20-mer unique DNA sequence
cggcggcaattaatacgaca

SEQ ID NO: 6663 - DNA, 20 bp, Artificial
  20-mer unique DNA sequence
caagcgcacaaaagggaacg

SEQ ID NO: 6664 - DNA, 20 bp, Artificial
  20-mer unique DNA sequence
agggagtatggccacgcgac

SEQ ID NO: 6665 - DNA, 20 bp, Artificial
  20-mer unique DNA sequence
gccccgcattttcattctcg

SEQ ID NO: 6666 - DNA, 20 bp, Artificial
  20-mer unique DNA sequence
agctccccgtgcttaaccct

SEQ ID NO: 6667 - DNA, 20 bp, Artificial
  20-mer unique DNA sequence
ttcaccccggccatctgcag

SEQ ID NO: 6668 - DNA, 20 bp, Artificial
  20-mer unique DNA sequence
gttggcagggagcgcgttct

SEQ ID NO: 6669 - DNA, 20 bp, Artificial
  20-mer unique DNA sequence
tggtgccctttcggttcgct

SEQ ID NO: 6670 - DNA, 20 bp, Artificial
  20-mer unique DNA sequence
acccccgacagagcaacacc

SEQ ID NO: 6671 - DNA, 20 bp, Artificial
  20-mer unique DNA sequence
tgcccacacatcgtcccaat

SEQ ID NO: 6672 - DNA, 20 bp, Artificial
  20-mer unique DNA sequence
ggctcttgcggcttttgcct

SEQ ID NO: 6673 - DNA, 20 bp, Artificial
  20-mer unique DNA sequence
caaaaggacacggagcccca

SEQ ID NO: 6674 - DNA, 20 bp, Artificial
  20-mer unique DNA sequence
aacccagcccaatgtcaccc

SEQ ID NO: 6675 - DNA, 20 bp, Artificial
  20-mer unique DNA sequence
ggggggcgtggaggactatg

SEQ ID NO: 6676 - DNA, 20 bp, Artificial
  20-mer unique DNA sequence
gagacgcacattcgagcaaa

SEQ ID NO: 6677 - DNA, 20 bp, Artificial
  20-mer unique DNA sequence
tgagggctggtgatttggca

SEQ ID NO: 6678 - DNA, 20 bp, Artificial
  20-mer unique DNA sequence
gtcgtaaccggtccaccact

SEQ ID NO: 6679 - DNA, 20 bp, Artificial
  20-mer unique DNA sequence
atcgttgtccgcagtgcctg

SEQ ID NO: 6680 - DNA, 20 bp, Artificial
  20-mer unique DNA sequence
aagaggaggcggagcgaggc

SEQ ID NO: 6681 - DNA, 20 bp, Artificial
  20-mer unique DNA sequence
tcccccgttattcatccgcc

SEQ ID NO: 6682 - DNA, 20 bp, Artificial
  20-mer unique DNA sequence
tgaatcgtgagctgcgcgaa

SEQ ID NO: 6683 - DNA, 20 bp, Artificial
  20-mer unique DNA sequence
cggataagcccgccagagca

SEQ ID NO: 6684 - DNA, 20 bp, Artificial
  20-mer unique DNA sequence
gtgctgcttgcggctgctgt

SEQ ID NO: 6685 - DNA, 20 bp, Artificial
  20-mer unique DNA sequence
gaggagcgcccccacgagat

SEQ ID NO: 6686 - DNA, 20 bp, Artificial
  20-mer unique DNA sequence
tgcgggcgagagggagtaat

SEQ ID NO: 6687 - DNA, 20 bp, Artificial
  20-mer unique DNA sequence
cagacgcacccatatcccgg

SEQ ID NO: 6688 - DNA, 20 bp, Artificial
  20-mer unique DNA sequence
ttgggcgcacccgtaggata

SEQ ID NO: 6689 - DNA, 20 bp, Artificial
  20-mer unique DNA sequence
tgtggtgccccgtaagtgga

SEQ ID NO: 6690 - DNA, 20 bp, Artificial
  20-mer unique DNA sequence
cctcagtgccattcccccca

SEQ ID NO: 6691 - DNA, 20 bp, Artificial
  20-mer unique DNA sequence
aagggtgggtcgatgcgttc

SEQ ID NO: 6692 - DNA, 20 bp, Artificial
  20-mer unique DNA sequence
tccacacatgcaagcccacg

SEQ ID NO: 6693 - DNA, 20 bp, Artificial
  20-mer unique DNA sequence
cacgaccccagccgcaagat

SEQ ID NO: 6694 - DNA, 20 bp, Artificial
  20-mer unique DNA sequence
gaacgttgggcgcggtaaaa

SEQ ID NO: 6695 - DNA, 20 bp, Artificial
  20-mer unique DNA sequence
aacacccttccagccaccgc

SEQ ID NO: 6696 - DNA, 20 bp, Artificial
  20-mer unique DNA sequence
agccatacgagggggggaag

SEQ ID NO: 6697 - DNA, 20 bp, Artificial
  20-mer unique DNA sequence
tcccctttcacccgagccag

SEQ ID NO: 6698 - DNA, 20 bp, Artificial
  20-mer unique DNA sequence
cgggagggctgggatcgaag

SEQ ID NO: 6699 - DNA, 20 bp, Artificial
  20-mer unique DNA sequence
agtcccctctgcatagcgcg

SEQ ID NO: 6700 - DNA, 20 bp, Artificial
  20-mer unique DNA sequence
tcgggatatttggcagcgtg

SEQ ID NO: 6701 - DNA, 20 bp, Artificial
  20-mer unique DNA sequence
acaagagcaccccggaacga

SEQ ID NO: 6702 - DNA, 20 bp, Artificial
  20-mer unique DNA sequence
cggcgtcgcgtataggcaga

SEQ ID NO: 6703 - DNA, 20 bp, Artificial
  20-mer unique DNA sequence
gcgacgctacaacatcggga

SEQ ID NO: 6704 - DNA, 20 bp, Artificial
  20-mer unique DNA sequence
cagagagatgtgcccccccg

SEQ ID NO: 6705 - DNA, 20 bp, Artificial
  20-mer unique DNA sequence
ggtacgtccgctctcgccgt

SEQ ID NO: 6706 - DNA, 20 bp, Artificial
  20-mer unique DNA sequence
tttgctccgccaccgtccac

SEQ ID NO: 6707 - DNA, 20 bp, Artificial
  20-mer unique DNA sequence
aagcaaacgagagccgagcg

SEQ ID NO: 6708 - DNA, 20 bp, Artificial
  20-mer unique DNA sequence
cagccccacccgagaagaac

SEQ ID NO: 6709 - DNA, 20 bp, Artificial
  20-mer unique DNA sequence
gcggggaacggaatagacgg

SEQ ID NO: 6710 - DNA, 20 bp, Artificial
  20-mer unique DNA sequence
gtgtgtgaggatccggccga

SEQ ID NO: 6711 - DNA, 20 bp, Artificial
  20-mer unique DNA sequence
ttctctggacgggccgtgat

SEQ ID NO: 6712 - DNA, 20 bp, Artificial
  20-mer unique DNA sequence
cccgaagcgccaaacctggg

SEQ ID NO: 6713 - DNA, 20 bp, Artificial
  20-mer unique DNA sequence
ccgcacgccgacactctcac

SEQ ID NO: 6714 - DNA, 20 bp, Artificial
  20-mer unique DNA sequence
agaggccgtggcgatgagtc

SEQ ID NO: 6715 - DNA, 20 bp, Artificial
  20-mer unique DNA sequence
cttgctcgctgcacggttcc

SEQ ID NO: 6716 - DNA, 20 bp, Artificial
  20-mer unique DNA sequence
cgggatcatttgggcctttg

SEQ ID NO: 6717 - DNA, 20 bp, Artificial
  20-mer unique DNA sequence
acctgtacgccccacctcga

SEQ ID NO: 6718 - DNA, 20 bp, Artificial
  20-mer unique DNA sequence
cgcgagaacgagccaacagc

SEQ ID NO: 6719 - DNA, 20 bp, Artificial
  20-mer unique DNA sequence
tcaggcaggcacacggacat

SEQ ID NO: 6720 - DNA, 20 bp, Artificial
  20-mer unique DNA sequence
tctgcctcccctcacccacc

SEQ ID NO: 6721 - DNA, 20 bp, Artificial
  20-mer unique DNA sequence
gcaagcggagacgggaacga

SEQ ID NO: 6722 - DNA, 20 bp, Artificial
  20-mer unique DNA sequence
cacccaacccccagcagcag

SEQ ID NO: 6723 - DNA, 20 bp, Artificial
  20-mer unique DNA sequence
aacgccgaaaggacgggaca

SEQ ID NO: 6724 - DNA, 20 bp, Artificial
  20-mer unique DNA sequence
gaaccaatagggccctgcca

SEQ ID NO: 6725 - DNA, 20 bp, Artificial
  20-mer unique DNA sequence
tccgggctgcgtactcactg

SEQ ID NO: 6726 - DNA, 20 bp, Artificial
  20-mer unique DNA sequence
ccccgaacgaattagaccgc

SEQ ID NO: 6727 - DNA, 20 bp, Artificial
  20-mer unique DNA sequence
acgcccctcgagcacatgtg

SEQ ID NO: 6728 - DNA, 20 bp, Artificial
  20-mer unique DNA sequence
tcccaggtcatccccgttga

SEQ ID NO: 6729 - DNA, 20 bp, Artificial
  20-mer unique DNA sequence
cggcgcgtagcgtaaacgat

SEQ ID NO: 6730 - DNA, 20 bp, Artificial
  20-mer unique DNA sequence
ctttcggttgcggatttcgg

SEQ ID NO: 6731 - DNA, 20 bp, Artificial
  20-mer unique DNA sequence
tcgcgttttgggtcggttca

SEQ ID NO: 6732 - DNA, 20 bp, Artificial
  20-mer unique DNA sequence
ccgtgccccccatcagctta

SEQ ID NO: 6733 - DNA, 20 bp, Artificial
  20-mer unique DNA sequence
cgaaccgaacgaaatcgcag

SEQ ID NO: 6734 - DNA, 20 bp, Artificial
  20-mer unique DNA sequence
tagccccccaggcgttcagg

SEQ ID NO: 6735 - DNA, 20 bp, Artificial
  20-mer unique DNA sequence
gcgtgggggtctgtgagtga

SEQ ID NO: 6736 - DNA, 20 bp, Artificial
  20-mer unique DNA sequence
tggggcggacagcaaacatc

SEQ ID NO: 6737 - DNA, 20 bp, Artificial
  20-mer unique DNA sequence
cgccttctttgatgctcggg

SEQ ID NO: 6738 - DNA, 20 bp, Artificial
  20-mer unique DNA sequence
agggactaggggtgctgggg

SEQ ID NO: 6739 - DNA, 20 bp, Artificial
  20-mer unique DNA sequence
atgacaacccgcgactccca

SEQ ID NO: 6740 - DNA, 20 bp, Artificial
  20-mer unique DNA sequence
cccagtgcccctcccagtaa

SEQ ID NO: 6741 - DNA, 20 bp, Artificial
  20-mer unique DNA sequence
gttcgtcgccctgcatccct

SEQ ID NO: 6742 - DNA, 20 bp, Artificial
  20-mer unique DNA sequence
tcctcgcgcaaaccgtacca

SEQ ID NO: 6743 - DNA, 20 bp, Artificial
  20-mer unique DNA sequence
gttgcacaggagccaggggt

SEQ ID NO: 6744 - DNA, 20 bp, Artificial
  20-mer unique DNA sequence
acgtgtccggttggactcag

SEQ ID NO: 6745 - DNA, 20 bp, Artificial
  20-mer unique DNA sequence
attcgagctacggcacggtt

SEQ ID NO: 6746 - DNA, 20 bp, Artificial
  20-mer unique DNA sequence
ggtgtaaattgggcgggcga

SEQ ID NO: 6747 - DNA, 20 bp, Artificial
  20-mer unique DNA sequence
cggggtctcggcggtgttct

SEQ ID NO: 6748 - DNA, 20 bp, Artificial
  20-mer unique DNA sequence
gcactgaggcgtcctgatga

SEQ ID NO: 6749 - DNA, 20 bp, Artificial
  20-mer unique DNA sequence
tcacatcgcgctgcgtacaa

SEQ ID NO: 6750 - DNA, 20 bp, Artificial
  20-mer unique DNA sequence
cgcgttgatccctctcgtgc

SEQ ID NO: 6751 - DNA, 20 bp, Artificial
  20-mer unique DNA sequence
tgggtgcgagacgatggagc

SEQ ID NO: 6752 - DNA, 20 bp, Artificial
  20-mer unique DNA sequence
cggcgaagaccaaagacgtg

SEQ ID NO: 6753 - DNA, 20 bp, Artificial
  20-mer unique DNA sequence
cgctccccgtccctatgtga

SEQ ID NO: 6754 - DNA, 20 bp, Artificial
  20-mer unique DNA sequence
tcggcgccccaaagagacta

SEQ ID NO: 6755 - DNA, 20 bp, Artificial
  20-mer unique DNA sequence
cgcggtctgtttccaagtgc

SEQ ID NO: 6756 - DNA, 20 bp, Artificial
  20-mer unique DNA sequence
cgttgggggccggtagaaaa

SEQ ID NO: 6757 - DNA, 20 bp, Artificial
  20-mer unique DNA sequence
ccccgcccagccgtagataa

SEQ ID NO: 6758 - DNA, 20 bp, Artificial
  20-mer unique DNA sequence
ggggctttcctggtcgactg

SEQ ID NO: 6759 - DNA, 20 bp, Artificial
  20-mer unique DNA sequence
aaagctctccccattcggcc

SEQ ID NO: 6760 - DNA, 20 bp, Artificial
  20-mer unique DNA sequence
cagatcccacgcacgcacag

SEQ ID NO: 6761 - DNA, 20 bp, Artificial
  20-mer unique DNA sequence
acacccccaaacgactgccg

SEQ ID NO: 6762 - DNA, 20 bp, Artificial
  20-mer unique DNA sequence
agtactggccttaggcacgc

SEQ ID NO: 6763 - DNA, 20 bp, Artificial
  20-mer unique DNA sequence
cggtacaccgtgcgacgttt

SEQ ID NO: 6764 - DNA, 20 bp, Artificial
  20-mer unique DNA sequence
ccgctcctcggaatttgcat

SEQ ID NO: 6765 - DNA, 20 bp, Artificial
  20-mer unique DNA sequence
gtcaagccccgagcagcaag

SEQ ID NO: 6766 - DNA, 20 bp, Artificial
  20-mer unique DNA sequence
agagcagacgagcggggcca

SEQ ID NO: 6767 - DNA, 20 bp, Artificial
  20-mer unique DNA sequence
aggcggcgggaatgtttagg

SEQ ID NO: 6768 - DNA, 20 bp, Artificial
  20-mer unique DNA sequence
aactcctcgcggcttgacgc

SEQ ID NO: 6769 - DNA, 20 bp, Artificial
  20-mer unique DNA sequence
ctcccggccatacttgctcc

SEQ ID NO: 6770 - DNA, 20 bp, Artificial
  20-mer unique DNA sequence
acagcctacaagcccgccag

SEQ ID NO: 6771 - DNA, 20 bp, Artificial
  20-mer unique DNA sequence
tgcccgctaagaacacaccg

SEQ ID NO: 6772 - DNA, 20 bp, Artificial
  20-mer unique DNA sequence
gggttgggacctgggacgct

SEQ ID NO: 6773 - DNA, 20 bp, Artificial
  20-mer unique DNA sequence
cacctgctgcccttcgtctg

SEQ ID NO: 6774 - DNA, 20 bp, Artificial
  20-mer unique DNA sequence
ttgtatggcccgaggtaggc

SEQ ID NO: 6775 - DNA, 20 bp, Artificial
  20-mer unique DNA sequence
cctagcgccccgatcacaag

SEQ ID NO: 6776 - DNA, 20 bp, Artificial
  20-mer unique DNA sequence
gccagcgaacaggggctaac

SEQ ID NO: 6777 - DNA, 20 bp, Artificial
  20-mer unique DNA sequence
cgtgagcatatggggcgatg

SEQ ID NO: 6778 - DNA, 20 bp, Artificial
  20-mer unique DNA sequence
cgctgtttgtgccggagaga

SEQ ID NO: 6779 - DNA, 20 bp, Artificial
  20-mer unique DNA sequence
ctgtcctcatccgcgtcttg

SEQ ID NO: 6780 - DNA, 20 bp, Artificial
  20-mer unique DNA sequence
cgccgcgctggataacatct

SEQ ID NO: 6781 - DNA, 20 bp, Artificial
  20-mer unique DNA sequence
ggactccggtaaacgccact

SEQ ID NO: 6782 - DNA, 20 bp, Artificial
  20-mer unique DNA sequence
gcccggctacaacgcaactt

SEQ ID NO: 6783 - DNA, 20 bp, Artificial
  20-mer unique DNA sequence
acctgtaagcgcccgacgaa

SEQ ID NO: 6784 - DNA, 20 bp, Artificial
  20-mer unique DNA sequence
gccggcgatcgtcaaaaaga

SEQ ID NO: 6785 - DNA, 20 bp, Artificial
  20-mer unique DNA sequence
gccacagcacccctttaccg

SEQ ID NO: 6786 - DNA, 20 bp, Artificial
  20-mer unique DNA sequence
gcgcctcgagacacaccaca

SEQ ID NO: 6787 - DNA, 20 bp, Artificial
  20-mer unique DNA sequence
ctggggggtcctgctttctg

SEQ ID NO: 6788 - DNA, 20 bp, Artificial
  20-mer unique DNA sequence
cgggaccggctggaatttga

SEQ ID NO: 6789 - DNA, 20 bp, Artificial
  20-mer unique DNA sequence
tgcaacccggctggatcttt

SEQ ID NO: 6790 - DNA, 20 bp, Artificial
  20-mer unique DNA sequence
tagtgaggggcaggcggatg

SEQ ID NO: 6791 - DNA, 20 bp, Artificial
  20-mer unique DNA sequence
gcgacggcggactgggttag

SEQ ID NO: 6792 - DNA, 20 bp, Artificial
  20-mer unique DNA sequence
cacacggtccagacctggtt

SEQ ID NO: 6793 - DNA, 20 bp, Artificial
  20-mer unique DNA sequence
atgggtcacagtgcgacgtg

SEQ ID NO: 6794 - DNA, 20 bp, Artificial
  20-mer unique DNA sequence
tccgagacgtccgttacgct

SEQ ID NO: 6795 - DNA, 20 bp, Artificial
  20-mer unique DNA sequence
caaccaggtgtcctcaggct

SEQ ID NO: 6796 - DNA, 20 bp, Artificial
  20-mer unique DNA sequence
gcgggaggggtgaaactgag

SEQ ID NO: 6797 - DNA, 20 bp, Artificial
  20-mer unique DNA sequence
tgggggggaaggcgagatgg

SEQ ID NO: 6798 - DNA, 20 bp, Artificial
  20-mer unique DNA sequence
agaagcgaacgagccccaca

SEQ ID NO: 6799 - DNA, 20 bp, Artificial
  20-mer unique DNA sequence
ggagcggcaggggagtttcg

SEQ ID NO: 6800 - DNA, 20 bp, Artificial
  20-mer unique DNA sequence
acttaaagggatgcgggggg

SEQ ID NO: 6801 - DNA, 20 bp, Artificial
  20-mer unique DNA sequence
ggccgcaaatacgggagaga

SEQ ID NO: 6802 - DNA, 20 bp, Artificial
  20-mer unique DNA sequence
aggcatgcgcgagaaaacat

SEQ ID NO: 6803 - DNA, 20 bp, Artificial
  20-mer unique DNA sequence
acctatcatgtggcgtcggg

SEQ ID NO: 6804 - DNA, 20 bp, Artificial
  20-mer unique DNA sequence
tttcggttgcgtgggcttca

SEQ ID NO: 6805 - DNA, 20 bp, Artificial
  20-mer unique DNA sequence
tatttgttgcgtcggggcgg

SEQ ID NO: 6806 - DNA, 20 bp, Artificial
  20-mer unique DNA sequence
ggctaggctttgttggcggc

SEQ ID NO: 6807 - DNA, 20 bp, Artificial
  20-mer unique DNA sequence
ttgctcccgtcccttatgcc

SEQ ID NO: 6808 - DNA, 20 bp, Artificial
  20-mer unique DNA sequence
cgaccccggaaggcctagtg

SEQ ID NO: 6809 - DNA, 20 bp, Artificial
  20-mer unique DNA sequence
gacttccgcgcgcattaccg

SEQ ID NO: 6810 - DNA, 20 bp, Artificial
  20-mer unique DNA sequence
gtccttttgcgggggcttgt

SEQ ID NO: 6811 - DNA, 20 bp, Artificial
  20-mer unique DNA sequence
acctcctccgctcccccgta

SEQ ID NO: 6812 - DNA, 20 bp, Artificial
  20-mer unique DNA sequence
tttaccaggctgcccagagc

SEQ ID NO: 6813 - DNA, 20 bp, Artificial
  20-mer unique DNA sequence
cctctgccgtctcccttgcc

SEQ ID NO: 6814 - DNA, 20 bp, Artificial
  20-mer unique DNA sequence
tgggggtgaggcgggagagt

SEQ ID NO: 6815 - DNA, 20 bp, Artificial
  20-mer unique DNA sequence
tccgcttttctttcgccaca

SEQ ID NO: 6816 - DNA, 20 bp, Artificial
  20-mer unique DNA sequence
cacccatccgcgaagtcaaa

SEQ ID NO: 6817 - DNA, 20 bp, Artificial
  20-mer unique DNA sequence
ggatgggcggagctgagttg

SEQ ID NO: 6818 - DNA, 20 bp, Artificial
  20-mer unique DNA sequence
gcgccaacacctaacgcgag

SEQ ID NO: 6819 - DNA, 20 bp, Artificial
  20-mer unique DNA sequence
cggcgcgtctttggcactaa

SEQ ID NO: 6820 - DNA, 20 bp, Artificial
  20-mer unique DNA sequence
atgttcagagccccaccccg

SEQ ID NO: 6821 - DNA, 20 bp, Artificial
  20-mer unique DNA sequence
gcaagccagatagcaccgcc

SEQ ID NO: 6822 - DNA, 20 bp, Artificial
  20-mer unique DNA sequence
acaaacgcgcggaaaaggaa

SEQ ID NO: 6823 - DNA, 20 bp, Artificial
  20-mer unique DNA sequence
gtggctggcgagaaagctgt

SEQ ID NO: 6824 - DNA, 20 bp, Artificial
  20-mer unique DNA sequence
tcgataggcgcagcacagtc

SEQ ID NO: 6825 - DNA, 20 bp, Artificial
  20-mer unique DNA sequence
tgacacacggtctgacccct

SEQ ID NO: 6826 - DNA, 20 bp, Artificial
  20-mer unique DNA sequence
ttgcaaactgcgtcagggga

SEQ ID NO: 6827 - DNA, 20 bp, Artificial
  20-mer unique DNA sequence
gatcccctcacgaccaagcc

SEQ ID NO: 6828 - DNA, 20 bp, Artificial
  20-mer unique DNA sequence
cagcggtcgagaaggatagg

SEQ ID NO: 6829 - DNA, 20 bp, Artificial
  20-mer unique DNA sequence
acctccatccccgacaccgc

SEQ ID NO: 6830 - DNA, 20 bp, Artificial
  20-mer unique DNA sequence
cggttgacagtcctagcggt

SEQ ID NO: 6831 - DNA, 20 bp, Artificial
  20-mer unique DNA sequence
tggctgtccagggctaaagg

SEQ ID NO: 6832 - DNA, 20 bp, Artificial
  20-mer unique DNA sequence
actgcggtcacgtgcggaaa

SEQ ID NO: 6833 - DNA, 20 bp, Artificial
  20-mer unique DNA sequence
agggagtgcagaaaggggct

SEQ ID NO: 6834 - DNA, 20 bp, Artificial
  20-mer unique DNA sequence
caaaaacggacattccccgc

SEQ ID NO: 6835 - DNA, 20 bp, Artificial
  20-mer unique DNA sequence
cccagcacgaccacgactcg

SEQ ID NO: 6836 - DNA, 20 bp, Artificial
  20-mer unique DNA sequence
tattctcgcaggcccacacg

SEQ ID NO: 6837 - DNA, 20 bp, Artificial
  20-mer unique DNA sequence
cgtcaaacgatccggcgctc

SEQ ID NO: 6838 - DNA, 20 bp, Artificial
  20-mer unique DNA sequence
aggcgacacgggcatagctc

SEQ ID NO: 6839 - DNA, 20 bp, Artificial
  20-mer unique DNA sequence
cggtccatggcgggaaaaga

SEQ ID NO: 6840 - DNA, 20 bp, Artificial
  20-mer unique DNA sequence
gaatgcgcaaacggggagag

SEQ ID NO: 6841 - DNA, 20 bp, Artificial
  20-mer unique DNA sequence
agcgcggtcggggtgaaact

SEQ ID NO: 6842 - DNA, 20 bp, Artificial
  20-mer unique DNA sequence
gtacttggacgccggtgggg

SEQ ID NO: 6843 - DNA, 20 bp, Artificial
  20-mer unique DNA sequence
acatggtgaagcgggggatc

SEQ ID NO: 6844 - DNA, 20 bp, Artificial
  20-mer unique DNA sequence
agtgaaaaaggccgcgatgc

SEQ ID NO: 6845 - DNA, 20 bp, Artificial
  20-mer unique DNA sequence
gaagcaccggccaactccat

SEQ ID NO: 6846 - DNA, 20 bp, Artificial
  20-mer unique DNA sequence
ttcatctcccgcgctgtcgg

SEQ ID NO: 6847 - DNA, 20 bp, Artificial
  20-mer unique DNA sequence
cgcaaatgatgaaaggcggc

SEQ ID NO: 6848 - DNA, 20 bp, Artificial
  20-mer unique DNA sequence
aaacggggggcgctaggtca

SEQ ID NO: 6849 - DNA, 20 bp, Artificial
  20-mer unique DNA sequence
ctagcatgacggagggggcg

SEQ ID NO: 6850 - DNA, 20 bp, Artificial
  20-mer unique DNA sequence
cgcacgggatgaaaacagca

SEQ ID NO: 6851 - DNA, 20 bp, Artificial
  20-mer unique DNA sequence
atgttgttgcccgggcttga

SEQ ID NO: 6852 - DNA, 20 bp, Artificial
  20-mer unique DNA sequence
aagacggtagcgccccagag

SEQ ID NO: 6853 - DNA, 20 bp, Artificial
  20-mer unique DNA sequence
aggcgaaagttaggggcggg

SEQ ID NO: 6854 - DNA, 20 bp, Artificial
  20-mer unique DNA sequence
acggggctcgcatgtacttc

SEQ ID NO: 6855 - DNA, 20 bp, Artificial
  20-mer unique DNA sequence
tatgcggtgcgagcaactcc

SEQ ID NO: 6856 - DNA, 20 bp, Artificial
  20-mer unique DNA sequence
atggcgtagatcggcgtcgt

SEQ ID NO: 6857 - DNA, 20 bp, Artificial
  20-mer unique DNA sequence
aaccgtgtgcggctgtacaa

SEQ ID NO: 6858 - DNA, 20 bp, Artificial
  20-mer unique DNA sequence
taaacagggccgaggatgcg

SEQ ID NO: 6859 - DNA, 20 bp, Artificial
  20-mer unique DNA sequence
gccacagagcccagatccgg

SEQ ID NO: 6860 - DNA, 20 bp, Artificial
  20-mer unique DNA sequence
cccacccccttgctaccgag

SEQ ID NO: 6861 - DNA, 20 bp, Artificial
  20-mer unique DNA sequence
agggttgacttctggccgga

SEQ ID NO: 6862 - DNA, 20 bp, Artificial
  20-mer unique DNA sequence
tgaaccgataccaaccgcga

SEQ ID NO: 6863 - DNA, 20 bp, Artificial
  20-mer unique DNA sequence
agaaacgtatgccacccgcc

SEQ ID NO: 6864 - DNA, 20 bp, Artificial
  20-mer unique DNA sequence
agcgtcgcggcgatcctatt

SEQ ID NO: 6865 - DNA, 20 bp, Artificial
  20-mer unique DNA sequence
cggttaccctagcggacgtt

SEQ ID NO: 6866 - DNA, 20 bp, Artificial
  20-mer unique DNA sequence
aacgtctcgccgtcgcatcc

SEQ ID NO: 6867 - DNA, 20 bp, Artificial
  20-mer unique DNA sequence
cggactgcgccaacaccatt

SEQ ID NO: 6868 - DNA, 20 bp, Artificial
  20-mer unique DNA sequence
aggtaatgcaagggtgccgg

SEQ ID NO: 6869 - DNA, 20 bp, Artificial
  20-mer unique DNA sequence
gcgtgtcggacgggcctttt

SEQ ID NO: 6870 - DNA, 20 bp, Artificial
  20-mer unique DNA sequence
acgtcatgttgggttcggcg

SEQ ID NO: 6871 - DNA, 20 bp, Artificial
  20-mer unique DNA sequence
atgatgaggcggatgggggt

SEQ ID NO: 6872 - DNA, 20 bp, Artificial
  20-mer unique DNA sequence
gaggagacgcggagtgggtg

SEQ ID NO: 6873 - DNA, 20 bp, Artificial
  20-mer unique DNA sequence
ttcaccccatatgcccgctc

SEQ ID NO: 6874 - DNA, 20 bp, Artificial
  20-mer unique DNA sequence
ggttcgtcagccctccgcat

SEQ ID NO: 6875 - DNA, 20 bp, Artificial
  20-mer unique DNA sequence
ttcggttttccccgggtcgt

SEQ ID NO: 6876 - DNA, 20 bp, Artificial
  20-mer unique DNA sequence
gatgagacgggcatagcgca

SEQ ID NO: 6877 - DNA, 20 bp, Artificial
  20-mer unique DNA sequence
agttgctggtcgcgggtttt

SEQ ID NO: 6878 - DNA, 20 bp, Artificial
  20-mer unique DNA sequence
cttgcgtcataggtgggccc

SEQ ID NO: 6879 - DNA, 20 bp, Artificial
  20-mer unique DNA sequence
cttcccggcgcttggttcat

SEQ ID NO: 6880 - DNA, 20 bp, Artificial
  20-mer unique DNA sequence
ggctgctcgtgggtgttgga

SEQ ID NO: 6881 - DNA, 20 bp, Artificial
  20-mer unique DNA sequence
ccccccggcaaagctgaaac

SEQ ID NO: 6882 - DNA, 20 bp, Artificial
  20-mer unique DNA sequence
gaacggaaaacggccaagga

SEQ ID NO: 6883 - DNA, 20 bp, Artificial
  20-mer unique DNA sequence
ggacctaccatcgcccgcac

SEQ ID NO: 6884 - DNA, 20 bp, Artificial
  20-mer unique DNA sequence
gcagtacgagccggcagcat

SEQ ID NO: 6885 - DNA, 20 bp, Artificial
  20-mer unique DNA sequence
tcgtccgccaaaacgtcaca

SEQ ID NO: 6886 - DNA, 20 bp, Artificial
  20-mer unique DNA sequence
agctgcaggggtcggttgaa

SEQ ID NO: 6887 - DNA, 20 bp, Artificial
  20-mer unique DNA sequence
acccaaccctagccatgcga

SEQ ID NO: 6888 - DNA, 20 bp, Artificial
  20-mer unique DNA sequence
tgaggacgggagcggagcat

SEQ ID NO: 6889 - DNA, 20 bp, Artificial
  20-mer unique DNA sequence
tacgtccaagccacatcggg

SEQ ID NO: 6890 - DNA, 20 bp, Artificial
  20-mer unique DNA sequence
atggccgtctaactggcgca

SEQ ID NO: 6891 - DNA, 20 bp, Artificial
  20-mer unique DNA sequence
aggacagtccgaatcgtgcg

SEQ ID NO: 6892 - DNA, 20 bp, Artificial
  20-mer unique DNA sequence
atgacaccaacccgggaacc

SEQ ID NO: 6893 - DNA, 20 bp, Artificial
  20-mer unique DNA sequence
gcgccggttgcaattgttcc

SEQ ID NO: 6894 - DNA, 20 bp, Artificial
  20-mer unique DNA sequence
agcaaactgtggacgccgga

SEQ ID NO: 6895 - DNA, 20 bp, Artificial
  20-mer unique DNA sequence
cgtgtatggagtgcggcagg

SEQ ID NO: 6896 - DNA, 20 bp, Artificial
  20-mer unique DNA sequence
aggagccgctcatgtgtgtg

SEQ ID NO: 6897 - DNA, 20 bp, Artificial
  20-mer unique DNA sequence
cgcagtgaccaggacctgaa

SEQ ID NO: 6898 - DNA, 20 bp, Artificial
  20-mer unique DNA sequence
ccgcctccttttccaccctg

SEQ ID NO: 6899 - DNA, 20 bp, Artificial
  20-mer unique DNA sequence
ccaagccaagcagccactcc

SEQ ID NO: 6900 - DNA, 20 bp, Artificial
  20-mer unique DNA sequence
cagccggtcattccccacag

SEQ ID NO: 6901 - DNA, 20 bp, Artificial
  20-mer unique DNA sequence
cgtattgcctgaggggcggt

SEQ ID NO: 6902 - DNA, 20 bp, Artificial
  20-mer unique DNA sequence
ttcgcgtgcggtgacctctt

SEQ ID NO: 6903 - DNA, 20 bp, Artificial
  20-mer unique DNA sequence
caactaacctcggtcccgct

SEQ ID NO: 6904 - DNA, 20 bp, Artificial
  20-mer unique DNA sequence
atcccctccacgcaaccgat

SEQ ID NO: 6905 - DNA, 20 bp, Artificial
  20-mer unique DNA sequence
ccgcaaaccccgtccaacaa

SEQ ID NO: 6906 - DNA, 20 bp, Artificial
  20-mer unique DNA sequence
gaaccccggaagacccccgt

SEQ ID NO: 6907 - DNA, 20 bp, Artificial
  20-mer unique DNA sequence
gtgagcgaggcggtttgtgg

SEQ ID NO: 6908 - DNA, 20 bp, Artificial
  20-mer unique DNA sequence
cgggcacctggctataccgt

SEQ ID NO: 6909 - DNA, 20 bp, Artificial
  20-mer unique DNA sequence
caatcccgccgaagacatga

SEQ ID NO: 6910 - DNA, 20 bp, Artificial
  20-mer unique DNA sequence
ccacgacccctcacgaacgc

SEQ ID NO: 6911 - DNA, 20 bp, Artificial
  20-mer unique DNA sequence
gcatcgggctctcctttcgg

SEQ ID NO: 6912 - DNA, 20 bp, Artificial
  20-mer unique DNA sequence
tgtgcaaaaggtgacgcggc

SEQ ID NO: 6913 - DNA, 20 bp, Artificial
  20-mer unique DNA sequence
tccaggccgcggttagggag

SEQ ID NO: 6914 - DNA, 20 bp, Artificial
  20-mer unique DNA sequence
aggcgatgcaccaagcaaaa

SEQ ID NO: 6915 - DNA, 20 bp, Artificial
  20-mer unique DNA sequence
cggagccgtcaggaagcatt

SEQ ID NO: 6916 - DNA, 20 bp, Artificial
  20-mer unique DNA sequence
taaaccctcttgcccccgcg

SEQ ID NO: 6917 - DNA, 20 bp, Artificial
  20-mer unique DNA sequence
gagcaccaccaaagcaccgg

SEQ ID NO: 6918 - DNA, 20 bp, Artificial
  20-mer unique DNA sequence
ctcaactaccccaagcgccg

SEQ ID NO: 6919 - DNA, 20 bp, Artificial
  20-mer unique DNA sequence
tatgctctcgcctttgcccg

SEQ ID NO: 6920 - DNA, 20 bp, Artificial
  20-mer unique DNA sequence
gtcgctcttcaccctcgccg

SEQ ID NO: 6921 - DNA, 20 bp, Artificial
  20-mer unique DNA sequence
gccgcggggttctgagttcc

SEQ ID NO: 6922 - DNA, 20 bp, Artificial
  20-mer unique DNA sequence
gtctcccatcgcgctccact

SEQ ID NO: 6923 - DNA, 20 bp, Artificial
  20-mer unique DNA sequence
gccggatatgtggggggaag

SEQ ID NO: 6924 - DNA, 20 bp, Artificial
  20-mer unique DNA sequence
gggcgcggagggttaggact

SEQ ID NO: 6925 - DNA, 20 bp, Artificial
  20-mer unique DNA sequence
cgtgactgaagaggcggtgg

SEQ ID NO: 6926 - DNA, 20 bp, Artificial
  20-mer unique DNA sequence
tgctccgcgcctgtaactgt

SEQ ID NO: 6927 - DNA, 20 bp, Artificial
  20-mer unique DNA sequence
ggaaactcggggaaaggcgt

SEQ ID NO: 6928 - DNA, 20 bp, Artificial
  20-mer unique DNA sequence
gagcccgggacacatcgaaa

SEQ ID NO: 6929 - DNA, 20 bp, Artificial
  20-mer unique DNA sequence
cataaggccatgggggggga

SEQ ID NO: 6930 - DNA, 20 bp, Artificial
  20-mer unique DNA sequence
gtgcccctgctcaaacccgt

SEQ ID NO: 6931 - DNA, 20 bp, Artificial
  20-mer unique DNA sequence
catcgcccgttttcatccca

SEQ ID NO: 6932 - DNA, 20 bp, Artificial
  20-mer unique DNA sequence
cccgcaacggactcacaagg

SEQ ID NO: 6933 - DNA, 20 bp, Artificial
  20-mer unique DNA sequence
gtgatctcgagtggcgtctg

SEQ ID NO: 6934 - DNA, 20 bp, Artificial
  20-mer unique DNA sequence
cgatgtgcgtcacctgaacc

SEQ ID NO: 6935 - DNA, 20 bp, Artificial
  20-mer unique DNA sequence
tctcggatcagaggcccagt

SEQ ID NO: 6936 - DNA, 20 bp, Artificial
  20-mer unique DNA sequence
acaccccgcttgcccagaaa

SEQ ID NO: 6937 - DNA, 20 bp, Artificial
  20-mer unique DNA sequence
ggacctccgcccttcttcga

SEQ ID NO: 6938 - DNA, 20 bp, Artificial
  20-mer unique DNA sequence
aaaccggtcgacttgctcca

SEQ ID NO: 6939 - DNA, 20 bp, Artificial
  20-mer unique DNA sequence
tgcagggagtggtgacgggt

SEQ ID NO: 6940 - DNA, 20 bp, Artificial
  20-mer unique DNA sequence
ctgagaaggggagtgcgggt

SEQ ID NO: 6941 - DNA, 20 bp, Artificial
  20-mer unique DNA sequence
acaagcgccgaacagccaca

SEQ ID NO: 6942 - DNA, 20 bp, Artificial
  20-mer unique DNA sequence
ttttacgaaccggctcgggg

SEQ ID NO: 6943 - DNA, 20 bp, Artificial
  20-mer unique DNA sequence
acgtcttacccggcgcacaa

SEQ ID NO: 6944 - DNA, 20 bp, Artificial
  20-mer unique DNA sequence
tgggctcggcacgtatccgg

SEQ ID NO: 6945 - DNA, 20 bp, Artificial
  20-mer unique DNA sequence
cctaggtgtttcggggtcgc

SEQ ID NO: 6946 - DNA, 20 bp, Artificial
  20-mer unique DNA sequence
cgccgccagaaaccgattac

SEQ ID NO: 6947 - DNA, 20 bp, Artificial
  20-mer unique DNA sequence
cccttcagacccagccaacc

SEQ ID NO: 6948 - DNA, 20 bp, Artificial
  20-mer unique DNA sequence
ggtccaaagggccagatgcg

SEQ ID NO: 6949 - DNA, 20 bp, Artificial
  20-mer unique DNA sequence
ttgcgagcactaccgggcta

SEQ ID NO: 6950 - DNA, 20 bp, Artificial
  20-mer unique DNA sequence
ttacatggtgcgcgtcgggt

SEQ ID NO: 6951 - DNA, 20 bp, Artificial
  20-mer unique DNA sequence
ctcggccttcgctctccctc

SEQ ID NO: 6952 - DNA, 20 bp, Artificial
  20-mer unique DNA sequence
ccggggtttaggatcgaggc

SEQ ID NO: 6953 - DNA, 20 bp, Artificial
  20-mer unique DNA sequence
ccccatgatgtttacgcggc

SEQ ID NO: 6954 - DNA, 20 bp, Artificial
  20-mer unique DNA sequence
tgggagactttggctggcgt

SEQ ID NO: 6955 - DNA, 20 bp, Artificial
  20-mer unique DNA sequence
tgtccgccccgtccttctga

SEQ ID NO: 6956 - DNA, 20 bp, Artificial
  20-mer unique DNA sequence
cagcgtcgaccgggaaaaac

SEQ ID NO: 6957 - DNA, 20 bp, Artificial
  20-mer unique DNA sequence
gcggtggggtggcgaatacg

SEQ ID NO: 6958 - DNA, 20 bp, Artificial
  20-mer unique DNA sequence
cctccagacaatcgccctcc

SEQ ID NO: 6959 - DNA, 20 bp, Artificial
  20-mer unique DNA sequence
accagaccttgacccgctcg

SEQ ID NO: 6960 - DNA, 20 bp, Artificial
  20-mer unique DNA sequence
cccgatgcggcttgttcctg

SEQ ID NO: 6961 - DNA, 20 bp, Artificial
  20-mer unique DNA sequence
atccttttggcgcgcgtgta

SEQ ID NO: 6962 - DNA, 20 bp, Artificial
  20-mer unique DNA sequence
tgctcgtaccttgcccctgg

SEQ ID NO: 6963 - DNA, 20 bp, Artificial
  20-mer unique DNA sequence
ccggggaaatcgcagtgtct

SEQ ID NO: 6964 - DNA, 20 bp, Artificial
  20-mer unique DNA sequence
aaccgccccaagaaatccga

SEQ ID NO: 6965 - DNA, 20 bp, Artificial
  20-mer unique DNA sequence
gtcaaacttaaatcgccgcc

SEQ ID NO: 6966 - DNA, 20 bp, Artificial
  20-mer unique DNA sequence
caccattttctcggcgtccc

SEQ ID NO: 6967 - DNA, 20 bp, Artificial
  20-mer unique DNA sequence
tttgtcgggggctgttgcac

SEQ ID NO: 6968 - DNA, 20 bp, Artificial
  20-mer unique DNA sequence
ttcgggtgtggtcgggtgtg

SEQ ID NO: 6969 - DNA, 20 bp, Artificial
  20-mer unique DNA sequence
gctcgcctctccggttgcct

SEQ ID NO: 6970 - DNA, 20 bp, Artificial
  20-mer unique DNA sequence
ccccagaacccagccacaca

SEQ ID NO: 6971 - DNA, 20 bp, Artificial
  20-mer unique DNA sequence
ggaggggggcggtcttttgt

SEQ ID NO: 6972 - DNA, 20 bp, Artificial
  20-mer unique DNA sequence
gccactgccccaattgtcaa

SEQ ID NO: 6973 - DNA, 20 bp, Artificial
  20-mer unique DNA sequence
gcgcccccctcgtatctagc

SEQ ID NO: 6974 - DNA, 20 bp, Artificial
  20-mer unique DNA sequence
tattgtaagcggcacgggcg

SEQ ID NO: 6975 - DNA, 20 bp, Artificial
  20-mer unique DNA sequence
caagttgcaagaggcagcgc

SEQ ID NO: 6976 - DNA, 20 bp, Artificial
  20-mer unique DNA sequence
aagtgagggtaccgagggaa

SEQ ID NO: 6977 - DNA, 20 bp, Artificial
  20-mer unique DNA sequence
ttcccactcaaaccccgcct

SEQ ID NO: 6978 - DNA, 20 bp, Artificial
  20-mer unique DNA sequence
ggcccgcaccatcgtcatta

SEQ ID NO: 6979 - DNA, 20 bp, Artificial
  20-mer unique DNA sequence
tggcgttaacctagtcgccc

SEQ ID NO: 6980 - DNA, 20 bp, Artificial
  20-mer unique DNA sequence
tgggagcagcaacgggagac

SEQ ID NO: 6981 - DNA, 20 bp, Artificial
  20-mer unique DNA sequence
tgcctgccaacacctgctca

SEQ ID NO: 6982 - DNA, 20 bp, Artificial
  20-mer unique DNA sequence
ggtaattccccgcgagcctt

SEQ ID NO: 6983 - DNA, 20 bp, Artificial
  20-mer unique DNA sequence
ggcggcgcatcgaatttaat

SEQ ID NO: 6984 - DNA, 20 bp, Artificial
  20-mer unique DNA sequence
cccctcgccaagcaaagcaa

SEQ ID NO: 6985 - DNA, 20 bp, Artificial
  20-mer unique DNA sequence
tgtggcaacgtgatggagct

SEQ ID NO: 6986 - DNA, 20 bp, Artificial
  20-mer unique DNA sequence
ccaacaaaagggaggttggg

SEQ ID NO: 6987 - DNA, 20 bp, Artificial
  20-mer unique DNA sequence
gccttcgtcgccccgattaa

SEQ ID NO: 6988 - DNA, 20 bp, Artificial
  20-mer unique DNA sequence
ccaccgctttttcaccccga

SEQ ID NO: 6989 - DNA, 20 bp, Artificial
  20-mer unique DNA sequence
gccaaggggcggctaagtgt

SEQ ID NO: 6990 - DNA, 20 bp, Artificial
  20-mer unique DNA sequence
ttccccacccccgccctatt

SEQ ID NO: 6991 - DNA, 20 bp, Artificial
  20-mer unique DNA sequence
cacgggaaagcatgcgacca

SEQ ID NO: 6992 - DNA, 20 bp, Artificial
  20-mer unique DNA sequence
ccgcgataccaggagcatga

SEQ ID NO: 6993 - DNA, 20 bp, Artificial
  20-mer unique DNA sequence
cgcttccaggtcgttgcatc

SEQ ID NO: 6994 - DNA, 20 bp, Artificial
  20-mer unique DNA sequence
aacgcccggcccgtattaaa

SEQ ID NO: 6995 - DNA, 20 bp, Artificial
  20-mer unique DNA sequence
acgcgggaccggttcgaata

SEQ ID NO: 6996 - DNA, 20 bp, Artificial
  20-mer unique DNA sequence
gttcttggatggagcggcga

SEQ ID NO: 6997 - DNA, 20 bp, Artificial
  20-mer unique DNA sequence
ggctgcggtgctgtggtaga

SEQ ID NO: 6998 - DNA, 20 bp, Artificial
  20-mer unique DNA sequence
cggggggtcgactagctgaa

SEQ ID NO: 6999 - DNA, 20 bp, Artificial
  20-mer unique DNA sequence
tgcccccctcttacataccc

SEQ ID NO: 7000 - DNA, 20 bp, Artificial
  20-mer unique DNA sequence
cagcggtatcacgtcggact

SEQ ID NO: 7001 - DNA, 20 bp, Artificial
  20-mer unique DNA sequence
aacagtggctcagctctccc

SEQ ID NO: 7002 - DNA, 20 bp, Artificial
  20-mer unique DNA sequence
cccacggatccgggcaaacc

SEQ ID NO: 7003 - DNA, 20 bp, Artificial
  20-mer unique DNA sequence
gcccgcttttccttacgcca

SEQ ID NO: 7004 - DNA, 20 bp, Artificial
  20-mer unique DNA sequence
ccgagggtgcattggagcgt

SEQ ID NO: 7005 - DNA, 20 bp, Artificial
  20-mer unique DNA sequence
tgtacgatctgtgcggccgg

SEQ ID NO: 7006 - DNA, 20 bp, Artificial
  20-mer unique DNA sequence
ggtcccgcttcgagttcccc

SEQ ID NO: 7007 - DNA, 20 bp, Artificial
  20-mer unique DNA sequence
tagcaaacagcagacggccg

SEQ ID NO: 7008 - DNA, 20 bp, Artificial
  20-mer unique DNA sequence
aaaaggtctatccggggtcg

SEQ ID NO: 7009 - DNA, 20 bp, Artificial
  20-mer unique DNA sequence
gcgcgttgttacgattggga

SEQ ID NO: 7010 - DNA, 20 bp, Artificial
  20-mer unique DNA sequence
cgccgggaaaaaaatgtgag

SEQ ID NO: 7011 - DNA, 20 bp, Artificial
  20-mer unique DNA sequence
ttggcaacctacgtcccgct

SEQ ID NO: 7012 - DNA, 20 bp, Artificial
  20-mer unique DNA sequence
tgaacgcagacggacccagg

SEQ ID NO: 7013 - DNA, 20 bp, Artificial
  20-mer unique DNA sequence
gggggccaataactcgtcca

SEQ ID NO: 7014 - DNA, 20 bp, Artificial
  20-mer unique DNA sequence
ggtgtgatggggtcgggagc

SEQ ID NO: 7015 - DNA, 20 bp, Artificial
  20-mer unique DNA sequence
cagttccgccaccaagccgt

SEQ ID NO: 7016 - DNA, 20 bp, Artificial
  20-mer unique DNA sequence
ctgagttccgacaacccgca

SEQ ID NO: 7017 - DNA, 20 bp, Artificial
  20-mer unique DNA sequence
gtactgctcggctggccctt

SEQ ID NO: 7018 - DNA, 20 bp, Artificial
  20-mer unique DNA sequence
cccggttcgcatatggttcg

SEQ ID NO: 7019 - DNA, 20 bp, Artificial
  20-mer unique DNA sequence
ctcgcacccgacaccaaacc

SEQ ID NO: 7020 - DNA, 20 bp, Artificial
  20-mer unique DNA sequence
tcgcatggcggtgagttgac

SEQ ID NO: 7021 - DNA, 20 bp, Artificial
  20-mer unique DNA sequence
tcccccacccttgagcaaaa

SEQ ID NO: 7022 - DNA, 20 bp, Artificial
  20-mer unique DNA sequence
actcgttcgggctggctgga

SEQ ID NO: 7023 - DNA, 20 bp, Artificial
  20-mer unique DNA sequence
ctgctctgccctcgaatgcc

SEQ ID NO: 7024 - DNA, 20 bp, Artificial
  20-mer unique DNA sequence
acgcggagaccgtgtacttt

SEQ ID NO: 7025 - DNA, 20 bp, Artificial
  20-mer unique DNA sequence
tcgtctcagaggtccaacgc

SEQ ID NO: 7026 - DNA, 20 bp, Artificial
  20-mer unique DNA sequence
cgcccagtaaacccagccca

SEQ ID NO: 7027 - DNA, 20 bp, Artificial
  20-mer unique DNA sequence
agcccacccttcacccgatt

SEQ ID NO: 7028 - DNA, 20 bp, Artificial
  20-mer unique DNA sequence
agtggagaggcaccaagcgc

SEQ ID NO: 7029 - DNA, 20 bp, Artificial
  20-mer unique DNA sequence
atgtgcggtgtggcgttccc

SEQ ID NO: 7030 - DNA, 20 bp, Artificial
  20-mer unique DNA sequence
agcgacaacgacccaaccct

SEQ ID NO: 7031 - DNA, 20 bp, Artificial
  20-mer unique DNA sequence
gatgggcgtattgcagagcg

SEQ ID NO: 7032 - DNA, 20 bp, Artificial
  20-mer unique DNA sequence
agccgcccaatttctcccga

SEQ ID NO: 7033 - DNA, 20 bp, Artificial
  20-mer unique DNA sequence
ggcgtccctgcgttcgttat

SEQ ID NO: 7034 - DNA, 20 bp, Artificial
  20-mer unique DNA sequence
tggtatcgcgggcaggtttg

SEQ ID NO: 7035 - DNA, 20 bp, Artificial
  20-mer unique DNA sequence
tttgcccggtgtgttcgttg

SEQ ID NO: 7036 - DNA, 20 bp, Artificial
  20-mer unique DNA sequence
caccgttaccagcgcccagg

SEQ ID NO: 7037 - DNA, 20 bp, Artificial
  20-mer unique DNA sequence
cacgtcgggcacatatgcgc

SEQ ID NO: 7038 - DNA, 20 bp, Artificial
  20-mer unique DNA sequence
cccctgaattgagctccgcc

SEQ ID NO: 7039 - DNA, 20 bp, Artificial
  20-mer unique DNA sequence
accccccgcgactagacttg

SEQ ID NO: 7040 - DNA, 20 bp, Artificial
  20-mer unique DNA sequence
cgtcaccgagaccctagccg

SEQ ID NO: 7041 - DNA, 20 bp, Artificial
  20-mer unique DNA sequence
gcgcaattccacctcagcag

SEQ ID NO: 7042 - DNA, 20 bp, Artificial
  20-mer unique DNA sequence
taaaaccaatgccgcggacc

SEQ ID NO: 7043 - DNA, 20 bp, Artificial
  20-mer unique DNA sequence
gacccccggcacgtattcct

SEQ ID NO: 7044 - DNA, 20 bp, Artificial
  20-mer unique DNA sequence
taggcggactcgggcagaat

SEQ ID NO: 7045 - DNA, 20 bp, Artificial
  20-mer unique DNA sequence
ttcgcgcctccaccctcagt

SEQ ID NO: 7046 - DNA, 20 bp, Artificial
  20-mer unique DNA sequence
gcacggtgatgcgtcgatga

SEQ ID NO: 7047 - DNA, 20 bp, Artificial
  20-mer unique DNA sequence
tcatccgtcggagcagagca

SEQ ID NO: 7048 - DNA, 20 bp, Artificial
  20-mer unique DNA sequence
tccctggctcttctgcgacg

SEQ ID NO: 7049 - DNA, 20 bp, Artificial
  20-mer unique DNA sequence
ggacctgccgcgctttacat

SEQ ID NO: 7050 - DNA, 20 bp, Artificial
  20-mer unique DNA sequence
tgtgctcttgcgtcccgatt

SEQ ID NO: 7051 - DNA, 20 bp, Artificial
  20-mer unique DNA sequence
gcgggcttctcttgctgggt

SEQ ID NO: 7052 - DNA, 20 bp, Artificial
  20-mer unique DNA sequence
accaccagacacgctccgct

SEQ ID NO: 7053 - DNA, 20 bp, Artificial
  20-mer unique DNA sequence
gggcgggtggctaaaatcgg

SEQ ID NO: 7054 - DNA, 20 bp, Artificial
  20-mer unique DNA sequence
gcggggggataggtgtaggc

SEQ ID NO: 7055 - DNA, 20 bp, Artificial
  20-mer unique DNA sequence
gtgtcggtcttcgggagggc

SEQ ID NO: 7056 - DNA, 20 bp, Artificial
  20-mer unique DNA sequence
attcggtcgtgggggtcctc

SEQ ID NO: 7057 - DNA, 20 bp, Artificial
  20-mer unique DNA sequence
ccgctgccccttttatttcg

SEQ ID NO: 7058 - DNA, 20 bp, Artificial
  20-mer unique DNA sequence
gcaacggaaataccccgcat

SEQ ID NO: 7059 - DNA, 20 bp, Artificial
  20-mer unique DNA sequence
gaatagcggcgttggccaaa

SEQ ID NO: 7060 - DNA, 20 bp, Artificial
  20-mer unique DNA sequence
ctgcgaggggggaactttga

SEQ ID NO: 7061 - DNA, 20 bp, Artificial
  20-mer unique DNA sequence
atgagccaccgttcgcgaga

SEQ ID NO: 7062 - DNA, 20 bp, Artificial
  20-mer unique DNA sequence
gcccagcacagcgtaaaccg

SEQ ID NO: 7063 - DNA, 20 bp, Artificial
  20-mer unique DNA sequence
cacccgcaccaccatcagtc

SEQ ID NO: 7064 - DNA, 20 bp, Artificial
  20-mer unique DNA sequence
aagttggatgggggtcggcc

SEQ ID NO: 7065 - DNA, 20 bp, Artificial
  20-mer unique DNA sequence
cgttttctctgccaatgccg

SEQ ID NO: 7066 - DNA, 20 bp, Artificial
  20-mer unique DNA sequence
cggttgcccactttcgtccc

SEQ ID NO: 7067 - DNA, 20 bp, Artificial
  20-mer unique DNA sequence
ctcctcctgatgcccaaccg

SEQ ID NO: 7068 - DNA, 20 bp, Artificial
  20-mer unique DNA sequence
tgggaagggggctaggggag

SEQ ID NO: 7069 - DNA, 20 bp, Artificial
  20-mer unique DNA sequence
acccgcacttgacccattcc

SEQ ID NO: 7070 - DNA, 20 bp, Artificial
  20-mer unique DNA sequence
gaagaaaccccacccatcgg

SEQ ID NO: 7071 - DNA, 20 bp, Artificial
  20-mer unique DNA sequence
ggaagggtttttttggcgcg

SEQ ID NO: 7072 - DNA, 20 bp, Artificial
  20-mer unique DNA sequence
cccaatgaaccgtaaccacc

SEQ ID NO: 7073 - DNA, 20 bp, Artificial
  20-mer unique DNA sequence
acttgtaacctccccgccga

SEQ ID NO: 7074 - DNA, 20 bp, Artificial
  20-mer unique DNA sequence
tcaccttagtgcgaccgggc

SEQ ID NO: 7075 - DNA, 20 bp, Artificial
  20-mer unique DNA sequence
gcctgttgggcttcgcgtat

SEQ ID NO: 7076 - DNA, 20 bp, Artificial
  20-mer unique DNA sequence
cgggaggaagggtgccaata

SEQ ID NO: 7077 - DNA, 20 bp, Artificial
  20-mer unique DNA sequence
tcttcggcgcgtgtttctcg

SEQ ID NO: 7078 - DNA, 20 bp, Artificial
  20-mer unique DNA sequence
ccccacgatcatttccgcct

SEQ ID NO: 7079 - DNA, 20 bp, Artificial
  20-mer unique DNA sequence
gccggcacaacgaatggaga

SEQ ID NO: 7080 - DNA, 20 bp, Artificial
  20-mer unique DNA sequence
gccctaataacgcccagccg

SEQ ID NO: 7081 - DNA, 20 bp, Artificial
  20-mer unique DNA sequence
cggcgtgcaattcgtcaaag

SEQ ID NO: 7082 - DNA, 20 bp, Artificial
  20-mer unique DNA sequence
gatttgctaacgagggcggg

SEQ ID NO: 7083 - DNA, 20 bp, Artificial
  20-mer unique DNA sequence
gcgttgcccctctcctgctg

SEQ ID NO: 7084 - DNA, 20 bp, Artificial
  20-mer unique DNA sequence
gcgggcgggtactgtaatgg

SEQ ID NO: 7085 - DNA, 20 bp, Artificial
  20-mer unique DNA sequence
cagggttccacgttccgcat

SEQ ID NO: 7086 - DNA, 20 bp, Artificial
  20-mer unique DNA sequence
aggcatcaggttcggggagg

SEQ ID NO: 7087 - DNA, 20 bp, Artificial
  20-mer unique DNA sequence
aagattaccacagccgcgcc

SEQ ID NO: 7088 - DNA, 20 bp, Artificial
  20-mer unique DNA sequence
ggcgggggtaaactcagctg

SEQ ID NO: 7089 - DNA, 20 bp, Artificial
  20-mer unique DNA sequence
cgcccaaatcactcccgctg

SEQ ID NO: 7090 - DNA, 20 bp, Artificial
  20-mer unique DNA sequence
gtccgcctagcacacaccga

SEQ ID NO: 7091 - DNA, 20 bp, Artificial
  20-mer unique DNA sequence
tcgccttccatgggcttagc

SEQ ID NO: 7092 - DNA, 20 bp, Artificial
  20-mer unique DNA sequence
agatccactgcccccccacc

SEQ ID NO: 7093 - DNA, 20 bp, Artificial
  20-mer unique DNA sequence
tgggtccttgggcgctagtg

SEQ ID NO: 7094 - DNA, 20 bp, Artificial
  20-mer unique DNA sequence
gaagggccgatgttgcgaac

SEQ ID NO: 7095 - DNA, 20 bp, Artificial
  20-mer unique DNA sequence
agcgccgacagcccagacaa

SEQ ID NO: 7096 - DNA, 20 bp, Artificial
  20-mer unique DNA sequence
gatttggcgatgggtcggtc

SEQ ID NO: 7097 - DNA, 20 bp, Artificial
  20-mer unique DNA sequence
cgcattttgctcgttccacg

SEQ ID NO: 7098 - DNA, 20 bp, Artificial
  20-mer unique DNA sequence
tgctaatgctttgctcgcgg

SEQ ID NO: 7099 - DNA, 20 bp, Artificial
  20-mer unique DNA sequence
aattcgcaaacccgcgcgat

SEQ ID NO: 7100 - DNA, 20 bp, Artificial
  20-mer unique DNA sequence
cgttattttcgtgtgcgcgg

SEQ ID NO: 7101 - DNA, 20 bp, Artificial
  20-mer unique DNA sequence
cggcagacggtgaagacaga

SEQ ID NO: 7102 - DNA, 20 bp, Artificial
  20-mer unique DNA sequence
gcgtatcacggggcagtagt

SEQ ID NO: 7103 - DNA, 20 bp, Artificial
  20-mer unique DNA sequence
ccttaggcgcgacttcgcta

SEQ ID NO: 7104 - DNA, 20 bp, Artificial
  20-mer unique DNA sequence
tcatggggggcgctagtttt

SEQ ID NO: 7105 - DNA, 20 bp, Artificial
  20-mer unique DNA sequence
gccggggacaaaaatgacgc

SEQ ID NO: 7106 - DNA, 20 bp, Artificial
  20-mer unique DNA sequence
ggcttacgcggggcattcgg

SEQ ID NO: 7107 - DNA, 20 bp, Artificial
  20-mer unique DNA sequence
cggtgaagattgcgcagtgg

SEQ ID NO: 7108 - DNA, 20 bp, Artificial
  20-mer unique DNA sequence
tcactccccgccattgtccc

SEQ ID NO: 7109 - DNA, 20 bp, Artificial
  20-mer unique DNA sequence
tgatcccctccctccgcact

SEQ ID NO: 7110 - DNA, 20 bp, Artificial
  20-mer unique DNA sequence
gggatgcgggcgagacagaa

SEQ ID NO: 7111 - DNA, 20 bp, Artificial
  20-mer unique DNA sequence
cagtacccgctcccgccaaa

SEQ ID NO: 7112 - DNA, 20 bp, Artificial
  20-mer unique DNA sequence
ttttttggggacggttcggg

SEQ ID NO: 7113 - DNA, 20 bp, Artificial
  20-mer unique DNA sequence
agggagccgtaaccgatggg

SEQ ID NO: 7114 - DNA, 20 bp, Artificial
  20-mer unique DNA sequence
tcaaccggatggactggggc

SEQ ID NO: 7115 - DNA, 20 bp, Artificial
  20-mer unique DNA sequence
gcggcccatcgaattctcca

SEQ ID NO: 7116 - DNA, 20 bp, Artificial
  20-mer unique DNA sequence
cgcgcgacataggaacagca

SEQ ID NO: 7117 - DNA, 20 bp, Artificial
  20-mer unique DNA sequence
gagccctgttcattccccgc

SEQ ID NO: 7118 - DNA, 20 bp, Artificial
  20-mer unique DNA sequence
ggccggctacgaggttttcc

SEQ ID NO: 7119 - DNA, 20 bp, Artificial
  20-mer unique DNA sequence
cactttccgcgttccttggg

SEQ ID NO: 7120 - DNA, 20 bp, Artificial
  20-mer unique DNA sequence
ggtcaggcctcgggttcatc

SEQ ID NO: 7121 - DNA, 20 bp, Artificial
  20-mer unique DNA sequence
agcgcatcctccgaaccact

SEQ ID NO: 7122 - DNA, 20 bp, Artificial
  20-mer unique DNA sequence
tttgcggttgtcgagatgcg

SEQ ID NO: 7123 - DNA, 20 bp, Artificial
  20-mer unique DNA sequence
ctttctgaggcgcgccctgt

SEQ ID NO: 7124 - DNA, 20 bp, Artificial
  20-mer unique DNA sequence
cgcgctttccagttaccccg

SEQ ID NO: 7125 - DNA, 20 bp, Artificial
  20-mer unique DNA sequence
ctgggccgcgctcctagcct

SEQ ID NO: 7126 - DNA, 20 bp, Artificial
  20-mer unique DNA sequence
ccccctatccggagcaccag

SEQ ID NO: 7127 - DNA, 20 bp, Artificial
  20-mer unique DNA sequence
acgccgcaccacatcacaaa

SEQ ID NO: 7128 - DNA, 20 bp, Artificial
  20-mer unique DNA sequence
tgcagaatgggcgagaccga

SEQ ID NO: 7129 - DNA, 20 bp, Artificial
  20-mer unique DNA sequence
cccacgccactcactcagca

SEQ ID NO: 7130 - DNA, 20 bp, Artificial
  20-mer unique DNA sequence
accaccgccctttcattgct

SEQ ID NO: 7131 - DNA, 20 bp, Artificial
  20-mer unique DNA sequence
tggaggcgtggtgggaatgt

SEQ ID NO: 7132 - DNA, 20 bp, Artificial
  20-mer unique DNA sequence
agcggacgagcaggcgagac

SEQ ID NO: 7133 - DNA, 20 bp, Artificial
  20-mer unique DNA sequence
gcgtgtagaggcttgtgggg

SEQ ID NO: 7134 - DNA, 20 bp, Artificial
  20-mer unique DNA sequence
gggtctcggttgtgctgctg

SEQ ID NO: 7135 - DNA, 20 bp, Artificial
  20-mer unique DNA sequence
ggcaatagggacggatggca

SEQ ID NO: 7136 - DNA, 20 bp, Artificial
  20-mer unique DNA sequence
cggggaaccaaatacggcgg

SEQ ID NO: 7137 - DNA, 20 bp, Artificial
  20-mer unique DNA sequence
gccagtcacgaatcgactgc

SEQ ID NO: 7138 - DNA, 20 bp, Artificial
  20-mer unique DNA sequence
acttattttgccgggggatg

SEQ ID NO: 7139 - DNA, 20 bp, Artificial
  20-mer unique DNA sequence
gaaaaagccccgcccaccac

SEQ ID NO: 7140 - DNA, 20 bp, Artificial
  20-mer unique DNA sequence
cgtaagattgtgtccgcgcg

SEQ ID NO: 7141 - DNA, 20 bp, Artificial
  20-mer unique DNA sequence
gagacggagatgtggcgcga

SEQ ID NO: 7142 - DNA, 20 bp, Artificial
  20-mer unique DNA sequence
gccccgaccatccagagaca

SEQ ID NO: 7143 - DNA, 20 bp, Artificial
  20-mer unique DNA sequence
cggatggtgcgaattgatgg

SEQ ID NO: 7144 - DNA, 20 bp, Artificial
  20-mer unique DNA sequence
ctatttcatggggagcgccg

SEQ ID NO: 7145 - DNA, 20 bp, Artificial
  20-mer unique DNA sequence
gtttcgtgcccggtgtatca

SEQ ID NO: 7146 - DNA, 20 bp, Artificial
  20-mer unique DNA sequence
cccccggcaaccaacctatg

SEQ ID NO: 7147 - DNA, 20 bp, Artificial
  20-mer unique DNA sequence
gcacggaatcatggaggcaa

SEQ ID NO: 7148 - DNA, 20 bp, Artificial
  20-mer unique DNA sequence
atgaaaggcagcgccaacgt

SEQ ID NO: 7149 - DNA, 20 bp, Artificial
  20-mer unique DNA sequence
accttccaatgacccggccg

SEQ ID NO: 7150 - DNA, 20 bp, Artificial
  20-mer unique DNA sequence
gccgtttgggtctggtggtg

SEQ ID NO: 7151 - DNA, 20 bp, Artificial
  20-mer unique DNA sequence
gaccgcgcagcccctataac

SEQ ID NO: 7152 - DNA, 20 bp, Artificial
  20-mer unique DNA sequence
gaaagcccagcgaccaacca

SEQ ID NO: 7153 - DNA, 20 bp, Artificial
  20-mer unique DNA sequence
tcgccaccatcgtaaacggc

SEQ ID NO: 7154 - DNA, 20 bp, Artificial
  20-mer unique DNA sequence
tggggtgctacggcaggaac

SEQ ID NO: 7155 - DNA, 20 bp, Artificial
  20-mer unique DNA sequence
tagctacgtcgggggcggtc

SEQ ID NO: 7156 - DNA, 20 bp, Artificial
  20-mer unique DNA sequence
atcggtagacggggctcaga

SEQ ID NO: 7157 - DNA, 20 bp, Artificial
  20-mer unique DNA sequence
ccgacgccgggtaggatgag

SEQ ID NO: 7158 - DNA, 20 bp, Artificial
  20-mer unique DNA sequence
tagattgggtaccgcggcct

SEQ ID NO: 7159 - DNA, 20 bp, Artificial
  20-mer unique DNA sequence
tggcggaaaagggggttgga

SEQ ID NO: 7160 - DNA, 20 bp, Artificial
  20-mer unique DNA sequence
cggcgggcaccagagatttt

SEQ ID NO: 7161 - DNA, 20 bp, Artificial
  20-mer unique DNA sequence
cccattcgggcccactctag

SEQ ID NO: 7162 - DNA, 20 bp, Artificial
  20-mer unique DNA sequence
gtgtgggcctgcctttgatg

SEQ ID NO: 7163 - DNA, 20 bp, Artificial
  20-mer unique DNA sequence
atctcgccccgcttttgcac

SEQ ID NO: 7164 - DNA, 20 bp, Artificial
  20-mer unique DNA sequence
cccgactctgcaacgctcaa

SEQ ID NO: 7165 - DNA, 20 bp, Artificial
  20-mer unique DNA sequence
aaggcgcccacctgctgaat

SEQ ID NO: 7166 - DNA, 20 bp, Artificial
  20-mer unique DNA sequence
ggcaatacccacccctcacg

SEQ ID NO: 7167 - DNA, 20 bp, Artificial
  20-mer unique DNA sequence
ttccacacaaccgtcccagc

SEQ ID NO: 7168 - DNA, 20 bp, Artificial
  20-mer unique DNA sequence
aaggggaggcaggaaacggt

SEQ ID NO: 7169 - DNA, 20 bp, Artificial
  20-mer unique DNA sequence
cgcgcctgtggtgatgaaat

SEQ ID NO: 7170 - DNA, 20 bp, Artificial
  20-mer unique DNA sequence
tgctgtggcggctgataagg

SEQ ID NO: 7171 - DNA, 20 bp, Artificial
  20-mer unique DNA sequence
gtgctcccgttaagatgcga

SEQ ID NO: 7172 - DNA, 20 bp, Artificial
  20-mer unique DNA sequence
gctgtgctggatccggggta

SEQ ID NO: 7173 - DNA, 20 bp, Artificial
  20-mer unique DNA sequence
cccagcatactcccggtccc

SEQ ID NO: 7174 - DNA, 20 bp, Artificial
  20-mer unique DNA sequence
tccgaaccacacgtagccga

SEQ ID NO: 7175 - DNA, 20 bp, Artificial
  20-mer unique DNA sequence
aagcacgggatggcgagaca

SEQ ID NO: 7176 - DNA, 20 bp, Artificial
  20-mer unique DNA sequence
aacggcctgaggcgtagttc

SEQ ID NO: 7177 - DNA, 20 bp, Artificial
  20-mer unique DNA sequence
aagatcgtcgggaccgggtt

SEQ ID NO: 7178 - DNA, 20 bp, Artificial
  20-mer unique DNA sequence
ctcccctacaagtccgcccc

SEQ ID NO: 7179 - DNA, 20 bp, Artificial
  20-mer unique DNA sequence
ggaggacgccagggagaggg

SEQ ID NO: 7180 - DNA, 20 bp, Artificial
  20-mer unique DNA sequence
tggaagcagggaccgggaat

SEQ ID NO: 7181 - DNA, 20 bp, Artificial
  20-mer unique DNA sequence
ccgcggctccttcgttctat

SEQ ID NO: 7182 - DNA, 20 bp, Artificial
  20-mer unique DNA sequence
tttccgcggctttttgtgcg

SEQ ID NO: 7183 - DNA, 20 bp, Artificial
  20-mer unique DNA sequence
gcgtctcggtgtgctgccta

SEQ ID NO: 7184 - DNA, 20 bp, Artificial
  20-mer unique DNA sequence
ttgggctcttgcagtggggt

SEQ ID NO: 7185 - DNA, 20 bp, Artificial
  20-mer unique DNA sequence
gggttcggttgccaggggta

SEQ ID NO: 7186 - DNA, 20 bp, Artificial
  20-mer unique DNA sequence
ggtggtgagggagctcgtcg

SEQ ID NO: 7187 - DNA, 20 bp, Artificial
  20-mer unique DNA sequence
aggaacccgcgcaagcagat

SEQ ID NO: 7188 - DNA, 20 bp, Artificial
  20-mer unique DNA sequence
caatatgcctggaaccgccg

SEQ ID NO: 7189 - DNA, 20 bp, Artificial
  20-mer unique DNA sequence
ccacatgcccctcccaacga

SEQ ID NO: 7190 - DNA, 20 bp, Artificial
  20-mer unique DNA sequence
tcggacccacaaaagacggg

SEQ ID NO: 7191 - DNA, 20 bp, Artificial
  20-mer unique DNA sequence
tcatgcctgtggctttcgca

SEQ ID NO: 7192 - DNA, 20 bp, Artificial
  20-mer unique DNA sequence
ggtcgggcagaagggattcg

SEQ ID NO: 7193 - DNA, 20 bp, Artificial
  20-mer unique DNA sequence
accgaactctcgacggtcct

SEQ ID NO: 7194 - DNA, 20 bp, Artificial
  20-mer unique DNA sequence
ctcttgcgatcggggctcct

SEQ ID NO: 7195 - DNA, 20 bp, Artificial
  20-mer unique DNA sequence
aggtcaggcggggagggtca

SEQ ID NO: 7196 - DNA, 20 bp, Artificial
  20-mer unique DNA sequence
acgtccagccagccagtccc

SEQ ID NO: 7197 - DNA, 20 bp, Artificial
  20-mer unique DNA sequence
agctagcgcaaccgatcccg

SEQ ID NO: 7198 - DNA, 20 bp, Artificial
  20-mer unique DNA sequence
tcaaggagcttcagcgcggt

SEQ ID NO: 7199 - DNA, 20 bp, Artificial
  20-mer unique DNA sequence
gcttttaaccgcttggggcg

SEQ ID NO: 7200 - DNA, 20 bp, Artificial
  20-mer unique DNA sequence
tactgcacgaccgccgacaa

SEQ ID NO: 7201 - DNA, 20 bp, Artificial
  20-mer unique DNA sequence
tccggaaatcaagcacgcaa

SEQ ID NO: 7202 - DNA, 20 bp, Artificial
  20-mer unique DNA sequence
ccgaacctcccgatcaatgc

SEQ ID NO: 7203 - DNA, 20 bp, Artificial
  20-mer unique DNA sequence
gatggtctcggttcgggagg

SEQ ID NO: 7204 - DNA, 20 bp, Artificial
  20-mer unique DNA sequence
ggggaacacaggaccaggga

SEQ ID NO: 7205 - DNA, 20 bp, Artificial
  20-mer unique DNA sequence
acaagggcccggaaatgagc

SEQ ID NO: 7206 - DNA, 20 bp, Artificial
  20-mer unique DNA sequence
accggtagcccgtttttcga

SEQ ID NO: 7207 - DNA, 20 bp, Artificial
  20-mer unique DNA sequence
tttggacgagcctcgcgacg

SEQ ID NO: 7208 - DNA, 20 bp, Artificial
  20-mer unique DNA sequence
tgcgtggtgaaatggggcat

SEQ ID NO: 7209 - DNA, 20 bp, Artificial
  20-mer unique DNA sequence
ggctggcttcggttaggtgc

SEQ ID NO: 7210 - DNA, 20 bp, Artificial
  20-mer unique DNA sequence
acggagtggttgcgaggcga

SEQ ID NO: 7211 - DNA, 20 bp, Artificial
  20-mer unique DNA sequence
tcgctcccctcgcacagata

SEQ ID NO: 7212 - DNA, 20 bp, Artificial
  20-mer unique DNA sequence
agcaagctggtcacgtcacg

SEQ ID NO: 7213 - DNA, 20 bp, Artificial
  20-mer unique DNA sequence
cccatgcgggctacaagtcg

SEQ ID NO: 7214 - DNA, 20 bp, Artificial
  20-mer unique DNA sequence
aaggggagcagacggaggag

SEQ ID NO: 7215 - DNA, 20 bp, Artificial
  20-mer unique DNA sequence
cgccactagcgctcattccc

SEQ ID NO: 7216 - DNA, 20 bp, Artificial
  20-mer unique DNA sequence
cccttgcggcgtgttggaat

SEQ ID NO: 7217 - DNA, 20 bp, Artificial
  20-mer unique DNA sequence
tacgggctcttttttggcgg

SEQ ID NO: 7218 - DNA, 20 bp, Artificial
  20-mer unique DNA sequence
ataggttttgcatcgccgcg

SEQ ID NO: 7219 - DNA, 20 bp, Artificial
  20-mer unique DNA sequence
aactttggtccgcgctcgag

SEQ ID NO: 7220 - DNA, 20 bp, Artificial
  20-mer unique DNA sequence
tccgcgtggcaaaactcttc

SEQ ID NO: 7221 - DNA, 20 bp, Artificial
  20-mer unique DNA sequence
ccagcaagacacgcgctccg

SEQ ID NO: 7222 - DNA, 20 bp, Artificial
  20-mer unique DNA sequence
acctcgcaatccccagcaac

SEQ ID NO: 7223 - DNA, 20 bp, Artificial
  20-mer unique DNA sequence
catttacccgctgccccact

SEQ ID NO: 7224 - DNA, 20 bp, Artificial
  20-mer unique DNA sequence
tgagggttcgagccgggagt

SEQ ID NO: 7225 - DNA, 20 bp, Artificial
  20-mer unique DNA sequence
gccttccccacccaagtcaa

SEQ ID NO: 7226 - DNA, 20 bp, Artificial
  20-mer unique DNA sequence
caagccaaggcgagcccctg

SEQ ID NO: 7227 - DNA, 20 bp, Artificial
  20-mer unique DNA sequence
tttcattgccagcgtccaag

SEQ ID NO: 7228 - DNA, 20 bp, Artificial
  20-mer unique DNA sequence
gacattaagaggaccgcggg

SEQ ID NO: 7229 - DNA, 20 bp, Artificial
  20-mer unique DNA sequence
cagcaagcggcggaatatcg

SEQ ID NO: 7230 - DNA, 20 bp, Artificial
  20-mer unique DNA sequence
tcttcgtggcggttctgtgc

SEQ ID NO: 7231 - DNA, 20 bp, Artificial
  20-mer unique DNA sequence
aggacgcgacgggcaggaat

SEQ ID NO: 7232 - DNA, 20 bp, Artificial
  20-mer unique DNA sequence
caagccctggctaagaccca

SEQ ID NO: 7233 - DNA, 20 bp, Artificial
  20-mer unique DNA sequence
tgatcgtgcgacgtcaagga

SEQ ID NO: 7234 - DNA, 20 bp, Artificial
  20-mer unique DNA sequence
gcggtgcttgtgatgcttgc

SEQ ID NO: 7235 - DNA, 20 bp, Artificial
  20-mer unique DNA sequence
atgcgccgatgttccttggt

SEQ ID NO: 7236 - DNA, 20 bp, Artificial
  20-mer unique DNA sequence
gcccggtgtcgtacgtctta

SEQ ID NO: 7237 - DNA, 20 bp, Artificial
  20-mer unique DNA sequence
ttccgtacggctaccccagt

SEQ ID NO: 7238 - DNA, 20 bp, Artificial
  20-mer unique DNA sequence
ctcgcccgacggctcctaat

SEQ ID NO: 7239 - DNA, 20 bp, Artificial
  20-mer unique DNA sequence
gcagcgagcttaacggggag

SEQ ID NO: 7240 - DNA, 20 bp, Artificial
  20-mer unique DNA sequence
gggggaagtcaggtgtgcgc

SEQ ID NO: 7241 - DNA, 20 bp, Artificial
  20-mer unique DNA sequence
gatacccctccgcattggcc

SEQ ID NO: 7242 - DNA, 20 bp, Artificial
  20-mer unique DNA sequence
tggtcgtggttcgctggatg

SEQ ID NO: 7243 - DNA, 20 bp, Artificial
  20-mer unique DNA sequence
taaggcgccaggggggagag

SEQ ID NO: 7244 - DNA, 20 bp, Artificial
  20-mer unique DNA sequence
cattcgggagccggttgagg

SEQ ID NO: 7245 - DNA, 20 bp, Artificial
  20-mer unique DNA sequence
agcagcccatcgagcccagt

SEQ ID NO: 7246 - DNA, 20 bp, Artificial
  20-mer unique DNA sequence
gcttctcgaccctccctgca

SEQ ID NO: 7247 - DNA, 20 bp, Artificial
  20-mer unique DNA sequence
gtgtccgcccctccaaagtg

SEQ ID NO: 7248 - DNA, 20 bp, Artificial
  20-mer unique DNA sequence
gaccctacacgtcaagcgga

SEQ ID NO: 7249 - DNA, 20 bp, Artificial
  20-mer unique DNA sequence
gtcgtgtatgagcgtcggga

SEQ ID NO: 7250 - DNA, 20 bp, Artificial
  20-mer unique DNA sequence
cgcgcgcacaaacttcgtaa

SEQ ID NO: 7251 - DNA, 20 bp, Artificial
  20-mer unique DNA sequence
gagggggtgctgcctacggc

SEQ ID NO: 7252 - DNA, 20 bp, Artificial
  20-mer unique DNA sequence
ttttggcggctgtgttccgt

SEQ ID NO: 7253 - DNA, 20 bp, Artificial
  20-mer unique DNA sequence
atgtgaactgccccccaccg

SEQ ID NO: 7254 - DNA, 20 bp, Artificial
  20-mer unique DNA sequence
agcaaaaacagccgcggcaa

SEQ ID NO: 7255 - DNA, 20 bp, Artificial
  20-mer unique DNA sequence
aacgttgcacacggctccac

SEQ ID NO: 7256 - DNA, 20 bp, Artificial
  20-mer unique DNA sequence
gcgccggagagaagtgggaa

SEQ ID NO: 7257 - DNA, 20 bp, Artificial
  20-mer unique DNA sequence
ccgcattctcctccgcacct

SEQ ID NO: 7258 - DNA, 20 bp, Artificial
  20-mer unique DNA sequence
ccatttccagacgcttccgc

SEQ ID NO: 7259 - DNA, 20 bp, Artificial
  20-mer unique DNA sequence
ccgccgcatacaaacgccat

SEQ ID NO: 7260 - DNA, 20 bp, Artificial
  20-mer unique DNA sequence
aaaggggcgcggtgtaacgg

SEQ ID NO: 7261 - DNA, 20 bp, Artificial
  20-mer unique DNA sequence
cgtccccttccctcaatccc

SEQ ID NO: 7262 - DNA, 20 bp, Artificial
  20-mer unique DNA sequence
gcaaagctgtgggcggaaga

SEQ ID NO: 7263 - DNA, 20 bp, Artificial
  20-mer unique DNA sequence
ttgaattcggtcacggggga

SEQ ID NO: 7264 - DNA, 20 bp, Artificial
  20-mer unique DNA sequence
ggccgtgggaaggatgtctc

SEQ ID NO: 7265 - DNA, 20 bp, Artificial
  20-mer unique DNA sequence
tcacgcgttttgttggcccc

SEQ ID NO: 7266 - DNA, 20 bp, Artificial
  20-mer unique DNA sequence
ccagggcggctgtcttgaat

SEQ ID NO: 7267 - DNA, 20 bp, Artificial
  20-mer unique DNA sequence
gcccggtacacgtaaccgta

SEQ ID NO: 7268 - DNA, 20 bp, Artificial
  20-mer unique DNA sequence
gtgcagctcgccattcaggt

SEQ ID NO: 7269 - DNA, 20 bp, Artificial
  20-mer unique DNA sequence
aacaggaggcccaaagcacc

SEQ ID NO: 7270 - DNA, 20 bp, Artificial
  20-mer unique DNA sequence
accctagcccgtctccgtcg

SEQ ID NO: 7271 - DNA, 20 bp, Artificial
  20-mer unique DNA sequence
taccatttgtgcctgccccc

SEQ ID NO: 7272 - DNA, 20 bp, Artificial
  20-mer unique DNA sequence
gtggttggagacgtggggcg

SEQ ID NO: 7273 - DNA, 20 bp, Artificial
  20-mer unique DNA sequence
caaactgcatatggcggggg

SEQ ID NO: 7274 - DNA, 20 bp, Artificial
  20-mer unique DNA sequence
gtggatgtgttgggacggcc

SEQ ID NO: 7275 - DNA, 20 bp, Artificial
  20-mer unique DNA sequence
tgaagtggtggtcgtgcccg

SEQ ID NO: 7276 - DNA, 20 bp, Artificial
  20-mer unique DNA sequence
cccacggctcgatcctacca

SEQ ID NO: 7277 - DNA, 20 bp, Artificial
  20-mer unique DNA sequence
gactaacacccggccgcact

SEQ ID NO: 7278 - DNA, 20 bp, Artificial
  20-mer unique DNA sequence
ggggggaagctggggcaata

SEQ ID NO: 7279 - DNA, 20 bp, Artificial
  20-mer unique DNA sequence
cagaggggttagcggtggcc

SEQ ID NO: 7280 - DNA, 20 bp, Artificial
  20-mer unique DNA sequence
gaatctcccgccctccacgt

SEQ ID NO: 7281 - DNA, 20 bp, Artificial
  20-mer unique DNA sequence
tgcgtggaggcttggcgata

SEQ ID NO: 7282 - DNA, 20 bp, Artificial
  20-mer unique DNA sequence
ggaacgggcaggaacatcgg

SEQ ID NO: 7283 - DNA, 20 bp, Artificial
  20-mer unique DNA sequence
cagatggatatgcgcgtgcg

SEQ ID NO: 7284 - DNA, 20 bp, Artificial
  20-mer unique DNA sequence
ccgatgaagaaaccgggcaa

SEQ ID NO: 7285 - DNA, 20 bp, Artificial
  20-mer unique DNA sequence
tagcggagggatgaccggga

SEQ ID NO: 7286 - DNA, 20 bp, Artificial
  20-mer unique DNA sequence
gatgcaacagcaagggcgac

SEQ ID NO: 7287 - DNA, 20 bp, Artificial
  20-mer unique DNA sequence
ttgccgtgtggggtgagtca

SEQ ID NO: 7288 - DNA, 20 bp, Artificial
  20-mer unique DNA sequence
accgccaggccacagtatcc

SEQ ID NO: 7289 - DNA, 20 bp, Artificial
  20-mer unique DNA sequence
gatctggctgtgagggggca

SEQ ID NO: 7290 - DNA, 20 bp, Artificial
  20-mer unique DNA sequence
cggcgctccagtacagggtt

SEQ ID NO: 7291 - DNA, 20 bp, Artificial
  20-mer unique DNA sequence
caatgttagagcacgcccgc

SEQ ID NO: 7292 - DNA, 20 bp, Artificial
  20-mer unique DNA sequence
cgggaatttacggagcggac

SEQ ID NO: 7293 - DNA, 20 bp, Artificial
  20-mer unique DNA sequence
aggccgctgtgtggtttgcg

SEQ ID NO: 7294 - DNA, 20 bp, Artificial
  20-mer unique DNA sequence
caccaaccacccgagcccaa

SEQ ID NO: 7295 - DNA, 20 bp, Artificial
  20-mer unique DNA sequence
cgcctctcttccgttggcat

SEQ ID NO: 7296 - DNA, 20 bp, Artificial
  20-mer unique DNA sequence
tgagcgccccgatagagcaa

SEQ ID NO: 7297 - DNA, 20 bp, Artificial
  20-mer unique DNA sequence
cttggcgctgtacccctttc

SEQ ID NO: 7298 - DNA, 20 bp, Artificial
  20-mer unique DNA sequence
tgcccggatccctagctccc

SEQ ID NO: 7299 - DNA, 20 bp, Artificial
  20-mer unique DNA sequence
gaaaaggtgggcgccaaaga

SEQ ID NO: 7300 - DNA, 20 bp, Artificial
  20-mer unique DNA sequence
cagtatctctccgggccgcc

SEQ ID NO: 7301 - DNA, 20 bp, Artificial
  20-mer unique DNA sequence
agggcgcatcactcggggtt

SEQ ID NO: 7302 - DNA, 20 bp, Artificial
  20-mer unique DNA sequence
aatcagccccgacaccgatc

SEQ ID NO: 7303 - DNA, 20 bp, Artificial
  20-mer unique DNA sequence
taaccggccatcaacgggat

SEQ ID NO: 7304 - DNA, 20 bp, Artificial
  20-mer unique DNA sequence
ctgcgtacctgcatccgtcg

SEQ ID NO: 7305 - DNA, 20 bp, Artificial
  20-mer unique DNA sequence
cctgacgcgccccttacgac

SEQ ID NO: 7306 - DNA, 20 bp, Artificial
  20-mer unique DNA sequence
cccgaatacgccacccaatg

SEQ ID NO: 7307 - DNA, 20 bp, Artificial
  20-mer unique DNA sequence
gtttcgcgttcggggtctgt

SEQ ID NO: 7308 - DNA, 20 bp, Artificial
  20-mer unique DNA sequence
ccactccatcatcccgctgc

SEQ ID NO: 7309 - DNA, 20 bp, Artificial
  20-mer unique DNA sequence
gcaccaccggcctacaatga

SEQ ID NO: 7310 - DNA, 20 bp, Artificial
  20-mer unique DNA sequence
ggggcaacaacgacctggag

SEQ ID NO: 7311 - DNA, 20 bp, Artificial
  20-mer unique DNA sequence
gaagcaggggagcgggtgag

SEQ ID NO: 7312 - DNA, 20 bp, Artificial
  20-mer unique DNA sequence
gcttggcaggcccgattaca

SEQ ID NO: 7313 - DNA, 20 bp, Artificial
  20-mer unique DNA sequence
gggggcttgaaccgggatga

SEQ ID NO: 7314 - DNA, 20 bp, Artificial
  20-mer unique DNA sequence
ggcaaaaagtggggcagggt

SEQ ID NO: 7315 - DNA, 20 bp, Artificial
  20-mer unique DNA sequence
acccaggaaccaccaagcga

SEQ ID NO: 7316 - DNA, 20 bp, Artificial
  20-mer unique DNA sequence
taccaaacgcgacggaagcc

SEQ ID NO: 7317 - DNA, 20 bp, Artificial
  20-mer unique DNA sequence
tcctgtttatgccgagccgg

SEQ ID NO: 7318 - DNA, 20 bp, Artificial
  20-mer unique DNA sequence
caaatgctaacaggcgcggc

SEQ ID NO: 7319 - DNA, 20 bp, Artificial
  20-mer unique DNA sequence
accaagcacagcgcaactcg

SEQ ID NO: 7320 - DNA, 20 bp, Artificial
  20-mer unique DNA sequence
caccgacgagcaggcgataa

SEQ ID NO: 7321 - DNA, 20 bp, Artificial
  20-mer unique DNA sequence
taggtgttggggctttgcgg

SEQ ID NO: 7322 - DNA, 20 bp, Artificial
  20-mer unique DNA sequence
cgtttgattcgggatggcca

SEQ ID NO: 7323 - DNA, 20 bp, Artificial
  20-mer unique DNA sequence
cggttgggctgctcgtgatc

SEQ ID NO: 7324 - DNA, 20 bp, Artificial
  20-mer unique DNA sequence
gttcccttcccggcttgtgg

SEQ ID NO: 7325 - DNA, 20 bp, Artificial
  20-mer unique DNA sequence
cacagcaccgagcaccatga

SEQ ID NO: 7326 - DNA, 20 bp, Artificial
  20-mer unique DNA sequence
aacttgtggacgggggggct

SEQ ID NO: 7327 - DNA, 20 bp, Artificial
  20-mer unique DNA sequence
tgtgccagtgtcctggatcg

SEQ ID NO: 7328 - DNA, 20 bp, Artificial
  20-mer unique DNA sequence
gtaggggggtgcggttaggg

SEQ ID NO: 7329 - DNA, 20 bp, Artificial
  20-mer unique DNA sequence
ccccaatcgctctgccacaa

SEQ ID NO: 7330 - DNA, 20 bp, Artificial
  20-mer unique DNA sequence
gggcgggcgaaaggttactc

SEQ ID NO: 7331 - DNA, 20 bp, Artificial
  20-mer unique DNA sequence
tttgagcgcttcgaccccga

SEQ ID NO: 7332 - DNA, 20 bp, Artificial
  20-mer unique DNA sequence
acggggggtgttgttggtgg

SEQ ID NO: 7333 - DNA, 20 bp, Artificial
  20-mer unique DNA sequence
agctgggtgtggcgaggtta

SEQ ID NO: 7334 - DNA, 20 bp, Artificial
  20-mer unique DNA sequence
agtccccggcagtcgataag

SEQ ID NO: 7335 - DNA, 20 bp, Artificial
  20-mer unique DNA sequence
taatcggtgctgggaacggc

SEQ ID NO: 7336 - DNA, 20 bp, Artificial
  20-mer unique DNA sequence
cgggtacgctaagaggtgct

SEQ ID NO: 7337 - DNA, 20 bp, Artificial
  20-mer unique DNA sequence
gagggggctttcggccaact

SEQ ID NO: 7338 - DNA, 20 bp, Artificial
  20-mer unique DNA sequence
actccgctcccttcccccac

SEQ ID NO: 7339 - DNA, 20 bp, Artificial
  20-mer unique DNA sequence
tgtacatcacggcccgagtg

SEQ ID NO: 7340 - DNA, 20 bp, Artificial
  20-mer unique DNA sequence
aacacgcgttgccgatctca

SEQ ID NO: 7341 - DNA, 20 bp, Artificial
  20-mer unique DNA sequence
tccgagcgggtcatgaaagg

SEQ ID NO: 7342 - DNA, 20 bp, Artificial
  20-mer unique DNA sequence
agaccccgacgctaccgctt

SEQ ID NO: 7343 - DNA, 20 bp, Artificial
  20-mer unique DNA sequence
aatcttgggtgcgtcggggg

SEQ ID NO: 7344 - DNA, 20 bp, Artificial
  20-mer unique DNA sequence
ccatcacgcaaccactcgcc

SEQ ID NO: 7345 - DNA, 20 bp, Artificial
  20-mer unique DNA sequence
cctccaccccgtcagcctca

SEQ ID NO: 7346 - DNA, 20 bp, Artificial
  20-mer unique DNA sequence
gaggggccgggtggagtaga

SEQ ID NO: 7347 - DNA, 20 bp, Artificial
  20-mer unique DNA sequence
ctgctgctcccgtcccccat

SEQ ID NO: 7348 - DNA, 20 bp, Artificial
  20-mer unique DNA sequence
ggggacacaggcaaaacggg

SEQ ID NO: 7349 - DNA, 20 bp, Artificial
  20-mer unique DNA sequence
ccgcacaggacaaacacgca

SEQ ID NO: 7350 - DNA, 20 bp, Artificial
  20-mer unique DNA sequence
actgaaggaccaagcgcgga

SEQ ID NO: 7351 - DNA, 20 bp, Artificial
  20-mer unique DNA sequence
gagacccatttccggatgat

SEQ ID NO: 7352 - DNA, 20 bp, Artificial
  20-mer unique DNA sequence
tggcgggctgagggactttg

SEQ ID NO: 7353 - DNA, 20 bp, Artificial
  20-mer unique DNA sequence
ttttgtcccttttcccgccg

SEQ ID NO: 7354 - DNA, 20 bp, Artificial
  20-mer unique DNA sequence
ccaatccactcctgctgcga

SEQ ID NO: 7355 - DNA, 20 bp, Artificial
  20-mer unique DNA sequence
cacacccgcacaaccccaat

SEQ ID NO: 7356 - DNA, 20 bp, Artificial
  20-mer unique DNA sequence
cgaaaacctcacgcccgcag

SEQ ID NO: 7357 - DNA, 20 bp, Artificial
  20-mer unique DNA sequence
tcaccgatacccagccaacg

SEQ ID NO: 7358 - DNA, 20 bp, Artificial
  20-mer unique DNA sequence
cgcgaacacggcatggtaga

SEQ ID NO: 7359 - DNA, 20 bp, Artificial
  20-mer unique DNA sequence
tctcgcgcggtccatccata

SEQ ID NO: 7360 - DNA, 20 bp, Artificial
  20-mer unique DNA sequence
ttagtgatttcgcgcccggt

SEQ ID NO: 7361 - DNA, 20 bp, Artificial
  20-mer unique DNA sequence
ctgggtctggaattagcggc

SEQ ID NO: 7362 - DNA, 20 bp, Artificial
  20-mer unique DNA sequence
ggagcccccgaaaggcgata

SEQ ID NO: 7363 - DNA, 20 bp, Artificial
  20-mer unique DNA sequence
gcccgatcacgtacagccgc

SEQ ID NO: 7364 - DNA, 20 bp, Artificial
  20-mer unique DNA sequence
aaatgaacgggtggcggctt

SEQ ID NO: 7365 - DNA, 20 bp, Artificial
  20-mer unique DNA sequence
ctgccacccctccgaaacag

SEQ ID NO: 7366 - DNA, 20 bp, Artificial
  20-mer unique DNA sequence
cctccttcccaccctcgcag

SEQ ID NO: 7367 - DNA, 20 bp, Artificial
  20-mer unique DNA sequence
ccgttatcctcagcccgtgc

SEQ ID NO: 7368 - DNA, 20 bp, Artificial
  20-mer unique DNA sequence
gggcccatcgtcggtcagtc

SEQ ID NO: 7369 - DNA, 20 bp, Artificial
  20-mer unique DNA sequence
cgccagcggggggagtaagt

SEQ ID NO: 7370 - DNA, 20 bp, Artificial
  20-mer unique DNA sequence
tagcggcggtgcagatcaag

SEQ ID NO: 7371 - DNA, 20 bp, Artificial
  20-mer unique DNA sequence
agcaggaggttgtgggccga

SEQ ID NO: 7372 - DNA, 20 bp, Artificial
  20-mer unique DNA sequence
gggccgacgtatgtgggtaa

SEQ ID NO: 7373 - DNA, 20 bp, Artificial
  20-mer unique DNA sequence
tgactagcgtccacgtcacc

SEQ ID NO: 7374 - DNA, 20 bp, Artificial
  20-mer unique DNA sequence
gggtaggcaggggagtgggc

SEQ ID NO: 7375 - DNA, 20 bp, Artificial
  20-mer unique DNA sequence
atcttttggctcgcgcgtcg

SEQ ID NO: 7376 - DNA, 20 bp, Artificial
  20-mer unique DNA sequence
agggcgggggcgacttgtat

SEQ ID NO: 7377 - DNA, 20 bp, Artificial
  20-mer unique DNA sequence
ttgggggtatcgtggcatgc

SEQ ID NO: 7378 - DNA, 20 bp, Artificial
  20-mer unique DNA sequence
actaaccatcgcaccggcca

SEQ ID NO: 7379 - DNA, 20 bp, Artificial
  20-mer unique DNA sequence
gtggccaacctccccgctct

SEQ ID NO: 7380 - DNA, 20 bp, Artificial
  20-mer unique DNA sequence
cttgccagccctttgccgtg

SEQ ID NO: 7381 - DNA, 20 bp, Artificial
  20-mer unique DNA sequence
gcccgggagaggactcgaca

SEQ ID NO: 7382 - DNA, 20 bp, Artificial
  20-mer unique DNA sequence
gttgcgcgatggttgaggtg

SEQ ID NO: 7383 - DNA, 20 bp, Artificial
  20-mer unique DNA sequence
agtttcggcgggggtcagag

SEQ ID NO: 7384 - DNA, 20 bp, Artificial
  20-mer unique DNA sequence
tgcatatgggacgaggggga

SEQ ID NO: 7385 - DNA, 20 bp, Artificial
  20-mer unique DNA sequence
agggtttgggcgtttgcggt

SEQ ID NO: 7386 - DNA, 20 bp, Artificial
  20-mer unique DNA sequence
aattttggaaccgcgcctca

SEQ ID NO: 7387 - DNA, 20 bp, Artificial
  20-mer unique DNA sequence
aggggtgtgcaaaggtccgg

SEQ ID NO: 7388 - DNA, 20 bp, Artificial
  20-mer unique DNA sequence
ttggcggggagagaaccttg

SEQ ID NO: 7389 - DNA, 20 bp, Artificial
  20-mer unique DNA sequence
tagccgagacgcccacgacc

SEQ ID NO: 7390 - DNA, 20 bp, Artificial
  20-mer unique DNA sequence
tatcttcgtgcgccgtcgtg

SEQ ID NO: 7391 - DNA, 20 bp, Artificial
  20-mer unique DNA sequence
gggacgatcggcaagcagga

SEQ ID NO: 7392 - DNA, 20 bp, Artificial
  20-mer unique DNA sequence
gcgccggccacagtatgatc

SEQ ID NO: 7393 - DNA, 20 bp, Artificial
  20-mer unique DNA sequence
ggggcttcgttcgcggactt

SEQ ID NO: 7394 - DNA, 20 bp, Artificial
  20-mer unique DNA sequence
tgcgaaaccgtgattcggct

SEQ ID NO: 7395 - DNA, 20 bp, Artificial
  20-mer unique DNA sequence
agcaaatgcggactgcctgt

SEQ ID NO: 7396 - DNA, 20 bp, Artificial
  20-mer unique DNA sequence
aattagcccccgtgcactcg

SEQ ID NO: 7397 - DNA, 20 bp, Artificial
  20-mer unique DNA sequence
ggttagggcgcgctttcgag

SEQ ID NO: 7398 - DNA, 20 bp, Artificial
  20-mer unique DNA sequence
acaaccatcctgcacgccca

SEQ ID NO: 7399 - DNA, 20 bp, Artificial
  20-mer unique DNA sequence
ccgtggtcgtatgtgcgctt

SEQ ID NO: 7400 - DNA, 20 bp, Artificial
  20-mer unique DNA sequence
cgcggttacgattggcacag

SEQ ID NO: 7401 - DNA, 20 bp, Artificial
  20-mer unique DNA sequence
tgttcgggggctgtgatgca

SEQ ID NO: 7402 - DNA, 20 bp, Artificial
  20-mer unique DNA sequence
gagaacggcaggctatgggg

SEQ ID NO: 7403 - DNA, 20 bp, Artificial
  20-mer unique DNA sequence
gaacttgcttgtcgcgcggc

SEQ ID NO: 7404 - DNA, 20 bp, Artificial
  20-mer unique DNA sequence
taacgtcgggtcgaggcacc

SEQ ID NO: 7405 - DNA, 20 bp, Artificial
  20-mer unique DNA sequence
cgcctgtcggttggggagta

SEQ ID NO: 7406 - DNA, 20 bp, Artificial
  20-mer unique DNA sequence
tactggtgtgcctttgccgg

SEQ ID NO: 7407 - DNA, 20 bp, Artificial
  20-mer unique DNA sequence
gacgggctttagggcacagg

SEQ ID NO: 7408 - DNA, 20 bp, Artificial
  20-mer unique DNA sequence
cacctaaccgacccacgccg

SEQ ID NO: 7409 - DNA, 20 bp, Artificial
  20-mer unique DNA sequence
gagggggtgacggaggttcg

SEQ ID NO: 7410 - DNA, 20 bp, Artificial
  20-mer unique DNA sequence
taaaaggggggccgaaagcg

SEQ ID NO: 7411 - DNA, 20 bp, Artificial
  20-mer unique DNA sequence
gactcctgccgcccacctcc

SEQ ID NO: 7412 - DNA, 20 bp, Artificial
  20-mer unique DNA sequence
tgcgcgatctgtcatcctgg

SEQ ID NO: 7413 - DNA, 20 bp, Artificial
  20-mer unique DNA sequence
aagccatgtccgctcggaag

SEQ ID NO: 7414 - DNA, 20 bp, Artificial
  20-mer unique DNA sequence
gacaaccccactcgcaggcc

SEQ ID NO: 7415 - DNA, 20 bp, Artificial
  20-mer unique DNA sequence
aacaaggaaacccccgccat

SEQ ID NO: 7416 - DNA, 20 bp, Artificial
  20-mer unique DNA sequence
gcccgcttattttcgccatg

SEQ ID NO: 7417 - DNA, 20 bp, Artificial
  20-mer unique DNA sequence
gttgggggacggagcgcttt

SEQ ID NO: 7418 - DNA, 20 bp, Artificial
  20-mer unique DNA sequence
cccatgctctgcccactcct

SEQ ID NO: 7419 - DNA, 20 bp, Artificial
  20-mer unique DNA sequence
cggcggaggaattggtgcag

SEQ ID NO: 7420 - DNA, 20 bp, Artificial
  20-mer unique DNA sequence
cagtcagcactcaggcagca

SEQ ID NO: 7421 - DNA, 20 bp, Artificial
  20-mer unique DNA sequence
tccccggtcccttcaactgg

SEQ ID NO: 7422 - DNA, 20 bp, Artificial
  20-mer unique DNA sequence
gccggggtcaagatgggcta

SEQ ID NO: 7423 - DNA, 20 bp, Artificial
  20-mer unique DNA sequence
ccactggtgaagcggcggag

SEQ ID NO: 7424 - DNA, 20 bp, Artificial
  20-mer unique DNA sequence
ctatcgcttacacccccgcc

SEQ ID NO: 7425 - DNA, 20 bp, Artificial
  20-mer unique DNA sequence
cccagcgctacttcgttccc

SEQ ID NO: 7426 - DNA, 20 bp, Artificial
  20-mer unique DNA sequence
gtcgtagatcttcgccgcgc

SEQ ID NO: 7427 - DNA, 20 bp, Artificial
  20-mer unique DNA sequence
ctcggtgttgtttggccccc

SEQ ID NO: 7428 - DNA, 20 bp, Artificial
  20-mer unique DNA sequence
tgcgggtatcgaacgggagt

SEQ ID NO: 7429 - DNA, 20 bp, Artificial
  20-mer unique DNA sequence
tgccccgcaccaatactacg

SEQ ID NO: 7430 - DNA, 20 bp, Artificial
  20-mer unique DNA sequence
atgggactttggagggcgca

SEQ ID NO: 7431 - DNA, 20 bp, Artificial
  20-mer unique DNA sequence
tgagcttgcaccgcgattgc

SEQ ID NO: 7432 - DNA, 20 bp, Artificial
  20-mer unique DNA sequence
cccctgttttggtcctctgc

SEQ ID NO: 7433 - DNA, 20 bp, Artificial
  20-mer unique DNA sequence
tcaaccagccgattcccagg

SEQ ID NO: 7434 - DNA, 20 bp, Artificial
  20-mer unique DNA sequence
ggcgcactaccgacaacccc

SEQ ID NO: 7435 - DNA, 20 bp, Artificial
  20-mer unique DNA sequence
ctgcgtccctggtccctcat

SEQ ID NO: 7436 - DNA, 20 bp, Artificial
  20-mer unique DNA sequence
agctgcctatgagctcgcac

SEQ ID NO: 7437 - DNA, 20 bp, Artificial
  20-mer unique DNA sequence
acaggctagcgaccctccat

SEQ ID NO: 7438 - DNA, 20 bp, Artificial
  20-mer unique DNA sequence
acgatccgtcccgctagcct

SEQ ID NO: 7439 - DNA, 20 bp, Artificial
  20-mer unique DNA sequence
ggggtgagaggcgggttagg

SEQ ID NO: 7440 - DNA, 20 bp, Artificial
  20-mer unique DNA sequence
gtttttgactccgcgcctgg

SEQ ID NO: 7441 - DNA, 20 bp, Artificial
  20-mer unique DNA sequence
tgtgcctacacacagtgggg

SEQ ID NO: 7442 - DNA, 20 bp, Artificial
  20-mer unique DNA sequence
gaagcctgccgaccacccaa

SEQ ID NO: 7443 - DNA, 20 bp, Artificial
  20-mer unique DNA sequence
aagggtgcggatgaaggacg

SEQ ID NO: 7444 - DNA, 20 bp, Artificial
  20-mer unique DNA sequence
tcaaacaccgccacgaacca

SEQ ID NO: 7445 - DNA, 20 bp, Artificial
  20-mer unique DNA sequence
ggggcaggtagatgggcagg

SEQ ID NO: 7446 - DNA, 20 bp, Artificial
  20-mer unique DNA sequence
gtttttacgaccgctgcgca

SEQ ID NO: 7447 - DNA, 20 bp, Artificial
  20-mer unique DNA sequence
cgtttcccggtgcgtatctg

SEQ ID NO: 7448 - DNA, 20 bp, Artificial
  20-mer unique DNA sequence
atgcttaggcctggttgcgg

SEQ ID NO: 7449 - DNA, 20 bp, Artificial
  20-mer unique DNA sequence
cccacccggcgacagaaatt

SEQ ID NO: 7450 - DNA, 20 bp, Artificial
  20-mer unique DNA sequence
cgcttactcgcgctgtacaa

SEQ ID NO: 7451 - DNA, 20 bp, Artificial
  20-mer unique DNA sequence
cccggtacggctggatacaa

SEQ ID NO: 7452 - DNA, 20 bp, Artificial
  20-mer unique DNA sequence
ggtgccaaagacaggcggaa

SEQ ID NO: 7453 - DNA, 20 bp, Artificial
  20-mer unique DNA sequence
gctttggtgccttgggctgc

SEQ ID NO: 7454 - DNA, 20 bp, Artificial
  20-mer unique DNA sequence
acgcagactcgcgttgacga

SEQ ID NO: 7455 - DNA, 20 bp, Artificial
  20-mer unique DNA sequence
tctggctcacggctgtacaa

SEQ ID NO: 7456 - DNA, 20 bp, Artificial
  20-mer unique DNA sequence
cctaacggccgctgaacgaa

SEQ ID NO: 7457 - DNA, 20 bp, Artificial
  20-mer unique DNA sequence
tgatgacgcccggtggaaga

SEQ ID NO: 7458 - DNA, 20 bp, Artificial
  20-mer unique DNA sequence
tgcccaacattacccacgga

SEQ ID NO: 7459 - DNA, 20 bp, Artificial
  20-mer unique DNA sequence
tcgtactggtctggggtttg

SEQ ID NO: 7460 - DNA, 20 bp, Artificial
  20-mer unique DNA sequence
cgaggtacgcgtagccaaca

SEQ ID NO: 7461 - DNA, 20 bp, Artificial
  20-mer unique DNA sequence
accgcagggactctcacgta

SEQ ID NO: 7462 - DNA, 20 bp, Artificial
  20-mer unique DNA sequence
ctcagctgcgtgtagcccat

SEQ ID NO: 7463 - DNA, 20 bp, Artificial
  20-mer unique DNA sequence
gtggggctccgcgtgattaa

SEQ ID NO: 7464 - DNA, 20 bp, Artificial
  20-mer unique DNA sequence
tcccaaaaacgccgcacata

SEQ ID NO: 7465 - DNA, 20 bp, Artificial
  20-mer unique DNA sequence
gtggggtttggacggacggt

SEQ ID NO: 7466 - DNA, 20 bp, Artificial
  20-mer unique DNA sequence
gatccgcgagacgccctttt

SEQ ID NO: 7467 - DNA, 20 bp, Artificial
  20-mer unique DNA sequence
caaaagctgccccaagaggg

SEQ ID NO: 7468 - DNA, 20 bp, Artificial
  20-mer unique DNA sequence
aagcattcccaacgcgaggc

SEQ ID NO: 7469 - DNA, 20 bp, Artificial
  20-mer unique DNA sequence
tgggcctcactctgcgggat

SEQ ID NO: 7470 - DNA, 20 bp, Artificial
  20-mer unique DNA sequence
gcccgacggaaaccgatgac

SEQ ID NO: 7471 - DNA, 20 bp, Artificial
  20-mer unique DNA sequence
ccaagtagcccacaccgcaa

SEQ ID NO: 7472 - DNA, 20 bp, Artificial
  20-mer unique DNA sequence
gccgttggagtgcagttccg

SEQ ID NO: 7473 - DNA, 20 bp, Artificial
  20-mer unique DNA sequence
ttgcagttcgctttgccctg

SEQ ID NO: 7474 - DNA, 20 bp, Artificial
  20-mer unique DNA sequence
ggctctgcgggaccaatcag

SEQ ID NO: 7475 - DNA, 20 bp, Artificial
  20-mer unique DNA sequence
gcgcctaaattgccgattgg

SEQ ID NO: 7476 - DNA, 20 bp, Artificial
  20-mer unique DNA sequence
atgtacacgactgcgtcgct

SEQ ID NO: 7477 - DNA, 20 bp, Artificial
  20-mer unique DNA sequence
ccccccgaactgaccccttt

SEQ ID NO: 7478 - DNA, 20 bp, Artificial
  20-mer unique DNA sequence
cctcgaagaacaccgctggc

SEQ ID NO: 7479 - DNA, 20 bp, Artificial
  20-mer unique DNA sequence
ttccgcttcacgcattccgc

SEQ ID NO: 7480 - DNA, 20 bp, Artificial
  20-mer unique DNA sequence
tcctagccccgcacgaacgt

SEQ ID NO: 7481 - DNA, 20 bp, Artificial
  20-mer unique DNA sequence
tttggcccgaaccatcgcta

SEQ ID NO: 7482 - DNA, 20 bp, Artificial
  20-mer unique DNA sequence
tgttgggcttccttcgctgg

SEQ ID NO: 7483 - DNA, 20 bp, Artificial
  20-mer unique DNA sequence
aaaagcccgccaagagacca

SEQ ID NO: 7484 - DNA, 20 bp, Artificial
  20-mer unique DNA sequence
gctggagacgtgcggggata

SEQ ID NO: 7485 - DNA, 20 bp, Artificial
  20-mer unique DNA sequence
caggggtgttggggaaaggc

SEQ ID NO: 7486 - DNA, 20 bp, Artificial
  20-mer unique DNA sequence
gcgggccattgcttttgtca

SEQ ID NO: 7487 - DNA, 20 bp, Artificial
  20-mer unique DNA sequence
acacgttttccccacccccc

SEQ ID NO: 7488 - DNA, 20 bp, Artificial
  20-mer unique DNA sequence
ccggccctatagcacccaaa

SEQ ID NO: 7489 - DNA, 20 bp, Artificial
  20-mer unique DNA sequence
ggcacggcattgggggacta

SEQ ID NO: 7490 - DNA, 20 bp, Artificial
  20-mer unique DNA sequence
gggttgctggggccttctct

SEQ ID NO: 7491 - DNA, 20 bp, Artificial
  20-mer unique DNA sequence
taatcgggaaggcaggctgg

SEQ ID NO: 7492 - DNA, 20 bp, Artificial
  20-mer unique DNA sequence
aaggatgcaagtgtggcggg

SEQ ID NO: 7493 - DNA, 20 bp, Artificial
  20-mer unique DNA sequence
cgccccaagtacagctcccc

SEQ ID NO: 7494 - DNA, 20 bp, Artificial
  20-mer unique DNA sequence
ctcccctcgttcgcaaccac

SEQ ID NO: 7495 - DNA, 20 bp, Artificial
  20-mer unique DNA sequence
ccagggatgaacgggagcca

SEQ ID NO: 7496 - DNA, 20 bp, Artificial
  20-mer unique DNA sequence
cccctacatcccgccaaccg

SEQ ID NO: 7497 - DNA, 20 bp, Artificial
  20-mer unique DNA sequence
cccgccgaaatgagtgccaa

SEQ ID NO: 7498 - DNA, 20 bp, Artificial
  20-mer unique DNA sequence
gcgtttgacggaccaccagt

SEQ ID NO: 7499 - DNA, 20 bp, Artificial
  20-mer unique DNA sequence
gccgcgaagccgaaggtagg

SEQ ID NO: 7500 - DNA, 20 bp, Artificial
  20-mer unique DNA sequence
ggggcggcggaatctttgag

SEQ ID NO: 7501 - DNA, 20 bp, Artificial
  20-mer unique DNA sequence
taccaagcccccattctgcc

SEQ ID NO: 7502 - DNA, 20 bp, Artificial
  20-mer unique DNA sequence
acaaggacatcgcggccaca

SEQ ID NO: 7503 - DNA, 20 bp, Artificial
  20-mer unique DNA sequence
gccccgcgcgattctctact

SEQ ID NO: 7504 - DNA, 20 bp, Artificial
  20-mer unique DNA sequence
tggttattcgcgcgcagcct

SEQ ID NO: 7505 - DNA, 20 bp, Artificial
  20-mer unique DNA sequence
aatagccgccagccgtccag

SEQ ID NO: 7506 - DNA, 20 bp, Artificial
  20-mer unique DNA sequence
cttcaggggcggcttggact

SEQ ID NO: 7507 - DNA, 20 bp, Artificial
  20-mer unique DNA sequence
tttcagcacaggatcccgca

SEQ ID NO: 7508 - DNA, 20 bp, Artificial
  20-mer unique DNA sequence
caacaaagcactcgcggggg

SEQ ID NO: 7509 - DNA, 20 bp, Artificial
  20-mer unique DNA sequence
ctgacggggaggattggcat

SEQ ID NO: 7510 - DNA, 20 bp, Artificial
  20-mer unique DNA sequence
gggatgactggttgaggccg

SEQ ID NO: 7511 - DNA, 20 bp, Artificial
  20-mer unique DNA sequence
gcggaagcacggagagcacc

SEQ ID NO: 7512 - DNA, 20 bp, Artificial
  20-mer unique DNA sequence
tgtacaagacgcgacgggga

SEQ ID NO: 7513 - DNA, 20 bp, Artificial
  20-mer unique DNA sequence
ggcttggctggttccgattc

SEQ ID NO: 7514 - DNA, 20 bp, Artificial
  20-mer unique DNA sequence
ggcccaccgcagtagttcga

SEQ ID NO: 7515 - DNA, 20 bp, Artificial
  20-mer unique DNA sequence
cgcttcgtcattggccatcc

SEQ ID NO: 7516 - DNA, 20 bp, Artificial
  20-mer unique DNA sequence
tggaaacgggacgatagcgg

SEQ ID NO: 7517 - DNA, 20 bp, Artificial
  20-mer unique DNA sequence
atacgtccccctcccccgag

SEQ ID NO: 7518 - DNA, 20 bp, Artificial
  20-mer unique DNA sequence
actaaatcggtgggcgctcg

SEQ ID NO: 7519 - DNA, 20 bp, Artificial
  20-mer unique DNA sequence
gacctgccctcttcacccga

SEQ ID NO: 7520 - DNA, 20 bp, Artificial
  20-mer unique DNA sequence
cgcagcactaccacggaccc

SEQ ID NO: 7521 - DNA, 20 bp, Artificial
  20-mer unique DNA sequence
tccgtcatccccatccgtcg

SEQ ID NO: 7522 - DNA, 20 bp, Artificial
  20-mer unique DNA sequence
atcttacaccgagcgcccct

SEQ ID NO: 7523 - DNA, 20 bp, Artificial
  20-mer unique DNA sequence
tagtatgtcggcgggcggtc

SEQ ID NO: 7524 - DNA, 20 bp, Artificial
  20-mer unique DNA sequence
accgaatactggccgtggga

SEQ ID NO: 7525 - DNA, 20 bp, Artificial
  20-mer unique DNA sequence
tcctgccggtccactcctca

SEQ ID NO: 7526 - DNA, 20 bp, Artificial
  20-mer unique DNA sequence
ggaggcatgattgggtggga

SEQ ID NO: 7527 - DNA, 20 bp, Artificial
  20-mer unique DNA sequence
ggtgaagccggtggaggacg

SEQ ID NO: 7528 - DNA, 20 bp, Artificial
  20-mer unique DNA sequence
gaaggccggccaatcgactt

SEQ ID NO: 7529 - DNA, 20 bp, Artificial
  20-mer unique DNA sequence
ctcgggcctatcacgcgctc

SEQ ID NO: 7530 - DNA, 20 bp, Artificial
  20-mer unique DNA sequence
aggtcggggggggttggaat

SEQ ID NO: 7531 - DNA, 20 bp, Artificial
  20-mer unique DNA sequence
ggggactgggtggagtgagc

SEQ ID NO: 7532 - DNA, 20 bp, Artificial
  20-mer unique DNA sequence
caaaattacgtcgccccccc

SEQ ID NO: 7533 - DNA, 20 bp, Artificial
  20-mer unique DNA sequence
cccacacaccaaaccgcaaa

SEQ ID NO: 7534 - DNA, 20 bp, Artificial
  20-mer unique DNA sequence
tccgttaagcggtcctgcat

SEQ ID NO: 7535 - DNA, 20 bp, Artificial
  20-mer unique DNA sequence
gttttagggtcgtcccgcgt

SEQ ID NO: 7536 - DNA, 20 bp, Artificial
  20-mer unique DNA sequence
cccgcccacatttccactgc

SEQ ID NO: 7537 - DNA, 20 bp, Artificial
  20-mer unique DNA sequence
cggatgggtattgcgaaggg

SEQ ID NO: 7538 - DNA, 20 bp, Artificial
  20-mer unique DNA sequence
ttcggtctttcatggcgcag

SEQ ID NO: 7539 - DNA, 20 bp, Artificial
  20-mer unique DNA sequence
accacgccgcattccacata

SEQ ID NO: 7540 - DNA, 20 bp, Artificial
  20-mer unique DNA sequence
gccggcctttggtgtactgg

SEQ ID NO: 7541 - DNA, 20 bp, Artificial
  20-mer unique DNA sequence
aggagctgggccgggtagtg

SEQ ID NO: 7542 - DNA, 20 bp, Artificial
  20-mer unique DNA sequence
tgatctggggaagcgaaggg

SEQ ID NO: 7543 - DNA, 20 bp, Artificial
  20-mer unique DNA sequence
gggggatgaagcaaacgtgg

SEQ ID NO: 7544 - DNA, 20 bp, Artificial
  20-mer unique DNA sequence
ttgagcccacgaaacgcctg

SEQ ID NO: 7545 - DNA, 20 bp, Artificial
  20-mer unique DNA sequence
ttaggagcgcgcgagtttga

SEQ ID NO: 7546 - DNA, 20 bp, Artificial
  20-mer unique DNA sequence
ctgacgggtccgacgtacaa

SEQ ID NO: 7547 - DNA, 20 bp, Artificial
  20-mer unique DNA sequence
gcgtgaacctggggagaacc

SEQ ID NO: 7548 - DNA, 20 bp, Artificial
  20-mer unique DNA sequence
tcagttgcacgcatttcccg

SEQ ID NO: 7549 - DNA, 20 bp, Artificial
  20-mer unique DNA sequence
ccgatatcttttggggggcg

SEQ ID NO: 7550 - DNA, 20 bp, Artificial
  20-mer unique DNA sequence
cctttacccgcggcccatta

SEQ ID NO: 7551 - DNA, 20 bp, Artificial
  20-mer unique DNA sequence
gcccccctctgttctgatgc

SEQ ID NO: 7552 - DNA, 20 bp, Artificial
  20-mer unique DNA sequence
tgggcggtttcggggagtat

SEQ ID NO: 7553 - DNA, 20 bp, Artificial
  20-mer unique DNA sequence
gcggttcctttggatgggta

SEQ ID NO: 7554 - DNA, 20 bp, Artificial
  20-mer unique DNA sequence
tgaccccatccgcctcttcc

SEQ ID NO: 7555 - DNA, 20 bp, Artificial
  20-mer unique DNA sequence
ccccagtcccctcggttcac

SEQ ID NO: 7556 - DNA, 20 bp, Artificial
  20-mer unique DNA sequence
tattgggcgccggtgggatt

SEQ ID NO: 7557 - DNA, 20 bp, Artificial
  20-mer unique DNA sequence
aagttacagagggggggcgg

SEQ ID NO: 7558 - DNA, 20 bp, Artificial
  20-mer unique DNA sequence
caaagacgtcccgcagcaag

SEQ ID NO: 7559 - DNA, 20 bp, Artificial
  20-mer unique DNA sequence
ccatcagggcggttactggg

SEQ ID NO: 7560 - DNA, 20 bp, Artificial
  20-mer unique DNA sequence
ctcctcccccgccgtctaaa

SEQ ID NO: 7561 - DNA, 20 bp, Artificial
  20-mer unique DNA sequence
aggcggcagggttggattgg

SEQ ID NO: 7562 - DNA, 20 bp, Artificial
  20-mer unique DNA sequence
ggctgaaaacgtgcccgggt

SEQ ID NO: 7563 - DNA, 20 bp, Artificial
  20-mer unique DNA sequence
cccgcttgatcatgtccgcg

SEQ ID NO: 7564 - DNA, 20 bp, Artificial
  20-mer unique DNA sequence
cccctcacaatctcgctccc

SEQ ID NO: 7565 - DNA, 20 bp, Artificial
  20-mer unique DNA sequence
gggggcaaaaagaaccaggc

SEQ ID NO: 7566 - DNA, 20 bp, Artificial
  20-mer unique DNA sequence
cggggaacgccaaaaacgat

SEQ ID NO: 7567 - DNA, 20 bp, Artificial
  20-mer unique DNA sequence
acacccctcacgtcttcgcc

SEQ ID NO: 7568 - DNA, 20 bp, Artificial
  20-mer unique DNA sequence
caaaccacacatcccggcac

SEQ ID NO: 7569 - DNA, 20 bp, Artificial
  20-mer unique DNA sequence
gcccgcgctgccatacttta

SEQ ID NO: 7570 - DNA, 20 bp, Artificial
  20-mer unique DNA sequence
tgcagcagtggcccaagaaa

SEQ ID NO: 7571 - DNA, 20 bp, Artificial
  20-mer unique DNA sequence
cgcgggcgaatagaaggacg

SEQ ID NO: 7572 - DNA, 20 bp, Artificial
  20-mer unique DNA sequence
ccccctgcgccataaacgac

SEQ ID NO: 7573 - DNA, 20 bp, Artificial
  20-mer unique DNA sequence
cccgaaccgcgatccacttt

SEQ ID NO: 7574 - DNA, 20 bp, Artificial
  20-mer unique DNA sequence
ttggggggggagggtactgt

SEQ ID NO: 7575 - DNA, 20 bp, Artificial
  20-mer unique DNA sequence
acgttttgggttgcgagcgg

SEQ ID NO: 7576 - DNA, 20 bp, Artificial
  20-mer unique DNA sequence
tcccgctcgaacgcctgtac

SEQ ID NO: 7577 - DNA, 20 bp, Artificial
  20-mer unique DNA sequence
aaagcacaacggagcagcgg

SEQ ID NO: 7578 - DNA, 20 bp, Artificial
  20-mer unique DNA sequence
accaaaagcgcccgaagaaa

SEQ ID NO: 7579 - DNA, 20 bp, Artificial
  20-mer unique DNA sequence
cgtggtgagggcgcaattgt

SEQ ID NO: 7580 - DNA, 20 bp, Artificial
  20-mer unique DNA sequence
tcagctgttgccctatcgag

SEQ ID NO: 7581 - DNA, 20 bp, Artificial
  20-mer unique DNA sequence
tggtgcacggagcgacttgt

SEQ ID NO: 7582 - DNA, 20 bp, Artificial
  20-mer unique DNA sequence
acgcaacgagccgagtaccg

SEQ ID NO: 7583 - DNA, 20 bp, Artificial
  20-mer unique DNA sequence
tccgggcgctccttcagtca

SEQ ID NO: 7584 - DNA, 20 bp, Artificial
  20-mer unique DNA sequence
ttcgtcccccttctgcggtt

SEQ ID NO: 7585 - DNA, 20 bp, Artificial
  20-mer unique DNA sequence
tgatgccttgacgcctaccg

SEQ ID NO: 7586 - DNA, 20 bp, Artificial
  20-mer unique DNA sequence
gcggagtcgggtgaaatgcg

SEQ ID NO: 7587 - DNA, 20 bp, Artificial
  20-mer unique DNA sequence
gagctacacggcgcgggaaa

SEQ ID NO: 7588 - DNA, 20 bp, Artificial
  20-mer unique DNA sequence
acggcgggcaactccaaaat

SEQ ID NO: 7589 - DNA, 20 bp, Artificial
  20-mer unique DNA sequence
ggtctcctccgcggtttgtc

SEQ ID NO: 7590 - DNA, 20 bp, Artificial
  20-mer unique DNA sequence
cccaaggccccacctcatca

SEQ ID NO: 7591 - DNA, 20 bp, Artificial
  20-mer unique DNA sequence
gcgttggattggcgtttggt

SEQ ID NO: 7592 - DNA, 20 bp, Artificial
  20-mer unique DNA sequence
ggttagcccggggtgatgat

SEQ ID NO: 7593 - DNA, 20 bp, Artificial
  20-mer unique DNA sequence
cgaaggagggcatggaccga

SEQ ID NO: 7594 - DNA, 20 bp, Artificial
  20-mer unique DNA sequence
atgcggcgggggttgtagct

SEQ ID NO: 7595 - DNA, 20 bp, Artificial
  20-mer unique DNA sequence
gtggatggaacagctggcga

SEQ ID NO: 7596 - DNA, 20 bp, Artificial
  20-mer unique DNA sequence
agcggtacgcgactgatctt

SEQ ID NO: 7597 - DNA, 20 bp, Artificial
  20-mer unique DNA sequence
attgagccacggtgcgaaac

SEQ ID NO: 7598 - DNA, 20 bp, Artificial
  20-mer unique DNA sequence
accacgtgggtagcctaacg

SEQ ID NO: 7599 - DNA, 20 bp, Artificial
  20-mer unique DNA sequence
gtgccaccggtacaacgtgt

SEQ ID NO: 7600 - DNA, 20 bp, Artificial
  20-mer unique DNA sequence
aggcaatagggcaaaggcgg

SEQ ID NO: 7601 - DNA, 20 bp, Artificial
  20-mer unique DNA sequence
tctgtctggtggcccctggt

SEQ ID NO: 7602 - DNA, 20 bp, Artificial
  20-mer unique DNA sequence
acaccatgcgcaaaggggct

SEQ ID NO: 7603 - DNA, 20 bp, Artificial
  20-mer unique DNA sequence
tgcgttggtgcgtcggtaac

SEQ ID NO: 7604 - DNA, 20 bp, Artificial
  20-mer unique DNA sequence
tccctgcccttcccggcctg

SEQ ID NO: 7605 - DNA, 20 bp, Artificial
  20-mer unique DNA sequence
acgttggtctccctttgtgc

SEQ ID NO: 7606 - DNA, 20 bp, Artificial
  20-mer unique DNA sequence
ttcgtttagtcccacgcggt

SEQ ID NO: 7607 - DNA, 20 bp, Artificial
  20-mer unique DNA sequence
aagctagcgcgagcgcttag

SEQ ID NO: 7608 - DNA, 20 bp, Artificial
  20-mer unique DNA sequence
tctgattgggtgggggctgt

SEQ ID NO: 7609 - DNA, 20 bp, Artificial
  20-mer unique DNA sequence
ttggatggattggtacgggg

SEQ ID NO: 7610 - DNA, 20 bp, Artificial
  20-mer unique DNA sequence
tggatctcaaggcctgccgt

SEQ ID NO: 7611 - DNA, 20 bp, Artificial
  20-mer unique DNA sequence
cagacgggatggcgtgattg

SEQ ID NO: 7612 - DNA, 20 bp, Artificial
  20-mer unique DNA sequence
gccgacgactgcatgaccca

SEQ ID NO: 7613 - DNA, 20 bp, Artificial
  20-mer unique DNA sequence
tcacaaagagagccggcgca

SEQ ID NO: 7614 - DNA, 20 bp, Artificial
  20-mer unique DNA sequence
cccgcagaccctttcccagt

SEQ ID NO: 7615 - DNA, 20 bp, Artificial
  20-mer unique DNA sequence
gttcgtcggggtggttgctg

SEQ ID NO: 7616 - DNA, 20 bp, Artificial
  20-mer unique DNA sequence
ggggggaagggtcagttgga

SEQ ID NO: 7617 - DNA, 20 bp, Artificial
  20-mer unique DNA sequence
gaaagcgggttgggagggac

SEQ ID NO: 7618 - DNA, 20 bp, Artificial
  20-mer unique DNA sequence
tgataagtcgacgcgcggtt

SEQ ID NO: 7619 - DNA, 20 bp, Artificial
  20-mer unique DNA sequence
gcagtgagtcattcgcgctt

SEQ ID NO: 7620 - DNA, 20 bp, Artificial
  20-mer unique DNA sequence
acgtcatccgtgaggggcta

SEQ ID NO: 7621 - DNA, 20 bp, Artificial
  20-mer unique DNA sequence
tctgtgcagtgagcacctcg

SEQ ID NO: 7622 - DNA, 20 bp, Artificial
  20-mer unique DNA sequence
ggattttcttggaggccccg

SEQ ID NO: 7623 - DNA, 20 bp, Artificial
  20-mer unique DNA sequence
cggtttgcatcgcctcccaa

SEQ ID NO: 7624 - DNA, 20 bp, Artificial
  20-mer unique DNA sequence
cggcattggcgtggttccta

SEQ ID NO: 7625 - DNA, 20 bp, Artificial
  20-mer unique DNA sequence
gctatggggctactcgcgga

SEQ ID NO: 7626 - DNA, 20 bp, Artificial
  20-mer unique DNA sequence
atcgaaactgggggggcaat

SEQ ID NO: 7627 - DNA, 20 bp, Artificial
  20-mer unique DNA sequence
acctacgcgcgcttgacaca

SEQ ID NO: 7628 - DNA, 20 bp, Artificial
  20-mer unique DNA sequence
tggaggtggttcggcggcta

SEQ ID NO: 7629 - DNA, 20 bp, Artificial
  20-mer unique DNA sequence
tttgaggggtttcggcagca

SEQ ID NO: 7630 - DNA, 20 bp, Artificial
  20-mer unique DNA sequence
tgtacacccgcacagcccgt

SEQ ID NO: 7631 - DNA, 20 bp, Artificial
  20-mer unique DNA sequence
atcccagcccgcgttgaaag

SEQ ID NO: 7632 - DNA, 20 bp, Artificial
  20-mer unique DNA sequence
tgcgtccaatagctccgcgg

SEQ ID NO: 7633 - DNA, 20 bp, Artificial
  20-mer unique DNA sequence
gactggacccgcccaaacga

SEQ ID NO: 7634 - DNA, 20 bp, Artificial
  20-mer unique DNA sequence
ggcaacggcaactccaatcg

SEQ ID NO: 7635 - DNA, 20 bp, Artificial
  20-mer unique DNA sequence
cggagggtgggtcgtggatc

SEQ ID NO: 7636 - DNA, 20 bp, Artificial
  20-mer unique DNA sequence
ccctccgactgcctgccttt

SEQ ID NO: 7637 - DNA, 20 bp, Artificial
  20-mer unique DNA sequence
agtctccctgcccgctcaaa

SEQ ID NO: 7638 - DNA, 20 bp, Artificial
  20-mer unique DNA sequence
cgccatttctcacccaacgc

SEQ ID NO: 7639 - DNA, 20 bp, Artificial
  20-mer unique DNA sequence
cgatcccgtttgccttgtga

SEQ ID NO: 7640 - DNA, 20 bp, Artificial
  20-mer unique DNA sequence
cggattggcatttgggtcgg

SEQ ID NO: 7641 - DNA, 20 bp, Artificial
  20-mer unique DNA sequence
ggacgggagcttttgtgggc

SEQ ID NO: 7642 - DNA, 20 bp, Artificial
  20-mer unique DNA sequence
agttccgcgagcgcagttca

SEQ ID NO: 7643 - DNA, 20 bp, Artificial
  20-mer unique DNA sequence
tacccgcgaggaccaggaat

SEQ ID NO: 7644 - DNA, 20 bp, Artificial
  20-mer unique DNA sequence
ggggccgcggaaagagactc

SEQ ID NO: 7645 - DNA, 20 bp, Artificial
  20-mer unique DNA sequence
cccgggaagaaagcgcatgt

SEQ ID NO: 7646 - DNA, 20 bp, Artificial
  20-mer unique DNA sequence
ttcctgggtttgccctctcg

SEQ ID NO: 7647 - DNA, 20 bp, Artificial
  20-mer unique DNA sequence
cggcggacagtttcgtttgg

SEQ ID NO: 7648 - DNA, 20 bp, Artificial
  20-mer unique DNA sequence
cggggctaatcgcgctaggg

SEQ ID NO: 7649 - DNA, 20 bp, Artificial
  20-mer unique DNA sequence
actggctaggcaagacgggc

SEQ ID NO: 7650 - DNA, 20 bp, Artificial
  20-mer unique DNA sequence
tttattgctcgcctccgcgt

SEQ ID NO: 7651 - DNA, 20 bp, Artificial
  20-mer unique DNA sequence
ggccaccggacttatcgccc

SEQ ID NO: 7652 - DNA, 20 bp, Artificial
  20-mer unique DNA sequence
tccgccctcccgagcatcta

SEQ ID NO: 7653 - DNA, 20 bp, Artificial
  20-mer unique DNA sequence
acctcagccctcgtctcccg

SEQ ID NO: 7654 - DNA, 20 bp, Artificial
  20-mer unique DNA sequence
gggtgctgtggtcgggagag

SEQ ID NO: 7655 - DNA, 20 bp, Artificial
  20-mer unique DNA sequence
caatacccgcacatccgcaa

SEQ ID NO: 7656 - DNA, 20 bp, Artificial
  20-mer unique DNA sequence
gcctgcggaattgggggctc

SEQ ID NO: 7657 - DNA, 20 bp, Artificial
  20-mer unique DNA sequence
acgtaaggcggcggggaaaa

SEQ ID NO: 7658 - DNA, 20 bp, Artificial
  20-mer unique DNA sequence
ttgtcggtcctgtgcggtgt

SEQ ID NO: 7659 - DNA, 20 bp, Artificial
  20-mer unique DNA sequence
gtggaaaaggccggggatgc

SEQ ID NO: 7660 - DNA, 20 bp, Artificial
  20-mer unique DNA sequence
aacggtccgtaggctaagcg

SEQ ID NO: 7661 - DNA, 20 bp, Artificial
  20-mer unique DNA sequence
accgatgagtccccccgatc

SEQ ID NO: 7662 - DNA, 20 bp, Artificial
  20-mer unique DNA sequence
tccgccacgttgcacctatg

SEQ ID NO: 7663 - DNA, 20 bp, Artificial
  20-mer unique DNA sequence
cctggggggtattttccgct

SEQ ID NO: 7664 - DNA, 20 bp, Artificial
  20-mer unique DNA sequence
aggtcacggtccgccactta

SEQ ID NO: 7665 - DNA, 20 bp, Artificial
  20-mer unique DNA sequence
agtttgcacggactcgacct

SEQ ID NO: 7666 - DNA, 20 bp, Artificial
  20-mer unique DNA sequence
gcgtcgcgttacctaagcac

SEQ ID NO: 7667 - DNA, 20 bp, Artificial
  20-mer unique DNA sequence
tgagtctagtccggctccga

SEQ ID NO: 7668 - DNA, 20 bp, Artificial
  20-mer unique DNA sequence
gcttagccggccaaacgatg

SEQ ID NO: 7669 - DNA, 20 bp, Artificial
  20-mer unique DNA sequence
tgttgggagtgcgcctgctg

SEQ ID NO: 7670 - DNA, 20 bp, Artificial
  20-mer unique DNA sequence
tgctatggagcgatcggcgt

SEQ ID NO: 7671 - DNA, 20 bp, Artificial
  20-mer unique DNA sequence
ccaggcgagcaccacgaatg

SEQ ID NO: 7672 - DNA, 20 bp, Artificial
  20-mer unique DNA sequence
gagagaaggggcgcgaacat

SEQ ID NO: 7673 - DNA, 20 bp, Artificial
  20-mer unique DNA sequence
acaggcgtggcaaggtaggc

SEQ ID NO: 7674 - DNA, 20 bp, Artificial
  20-mer unique DNA sequence
gcccccaggaccagaaatga

SEQ ID NO: 7675 - DNA, 20 bp, Artificial
  20-mer unique DNA sequence
catcagacccccttgccgtt

SEQ ID NO: 7676 - DNA, 20 bp, Artificial
  20-mer unique DNA sequence
tccccacccagccctctcaa

SEQ ID NO: 7677 - DNA, 20 bp, Artificial
  20-mer unique DNA sequence
catccgacaaaagccccagg

SEQ ID NO: 7678 - DNA, 20 bp, Artificial
  20-mer unique DNA sequence
tagcaaagcgggagcatcgg

SEQ ID NO: 7679 - DNA, 20 bp, Artificial
  20-mer unique DNA sequence
gcagcgccggaaacatgaag

SEQ ID NO: 7680 - DNA, 20 bp, Artificial
  20-mer unique DNA sequence
aagcaggacaggagcgggga

SEQ ID NO: 7681 - DNA, 20 bp, Artificial
  20-mer unique DNA sequence
tcgctgctaatccccccttg

SEQ ID NO: 7682 - DNA, 20 bp, Artificial
  20-mer unique DNA sequence
gagcaaaggcggaaaggcgg

SEQ ID NO: 7683 - DNA, 20 bp, Artificial
  20-mer unique DNA sequence
aaaacgccaacactcgccca

SEQ ID NO: 7684 - DNA, 20 bp, Artificial
  20-mer unique DNA sequence
atgtgatcccgcctttgcgc

SEQ ID NO: 7685 - DNA, 20 bp, Artificial
  20-mer unique DNA sequence
ggctaggcggaggagggctt

SEQ ID NO: 7686 - DNA, 20 bp, Artificial
  20-mer unique DNA sequence
cggcgtagtgggtgaggctg

SEQ ID NO: 7687 - DNA, 20 bp, Artificial
  20-mer unique DNA sequence
cgggcgtgaaagacatgggg

SEQ ID NO: 7688 - DNA, 20 bp, Artificial
  20-mer unique DNA sequence
cctcaggaaccccacacgat

SEQ ID NO: 7689 - DNA, 20 bp, Artificial
  20-mer unique DNA sequence
gcgagcaggcggataggaga

SEQ ID NO: 7690 - DNA, 20 bp, Artificial
  20-mer unique DNA sequence
ttgcggggctcttggatcga

SEQ ID NO: 7691 - DNA, 20 bp, Artificial
  20-mer unique DNA sequence
tcaagacccaccgcctagga

SEQ ID NO: 7692 - DNA, 20 bp, Artificial
  20-mer unique DNA sequence
cataaccgtccgtccccgct

SEQ ID NO: 7693 - DNA, 20 bp, Artificial
  20-mer unique DNA sequence
ggcggaggtgatggtggttc

SEQ ID NO: 7694 - DNA, 20 bp, Artificial
  20-mer unique DNA sequence
acacgagacgcacccatccc

SEQ ID NO: 7695 - DNA, 20 bp, Artificial
  20-mer unique DNA sequence
tcacacgaacccgaagcagg

SEQ ID NO: 7696 - DNA, 20 bp, Artificial
  20-mer unique DNA sequence
ctcgtccctgccttgtgccg

SEQ ID NO: 7697 - DNA, 20 bp, Artificial
  20-mer unique DNA sequence
tctgctctggggctgctgtg

SEQ ID NO: 7698 - DNA, 20 bp, Artificial
  20-mer unique DNA sequence
caatccacgcacaaatcccg

SEQ ID NO: 7699 - DNA, 20 bp, Artificial
  20-mer unique DNA sequence
tctggaggcaggtgggtgga

SEQ ID NO: 7700 - DNA, 20 bp, Artificial
  20-mer unique DNA sequence
catgccgccactccgtgtag

SEQ ID NO: 7701 - DNA, 20 bp, Artificial
  20-mer unique DNA sequence
gctgggcggattcggacgtt

SEQ ID NO: 7702 - DNA, 20 bp, Artificial
  20-mer unique DNA sequence
ttcatttcgctcaccgcccg

SEQ ID NO: 7703 - DNA, 20 bp, Artificial
  20-mer unique DNA sequence
gggggcggaaatggaaactc

SEQ ID NO: 7704 - DNA, 20 bp, Artificial
  20-mer unique DNA sequence
accggcacccctcatgttca

SEQ ID NO: 7705 - DNA, 20 bp, Artificial
  20-mer unique DNA sequence
tgatgatgggaacagggggg

SEQ ID NO: 7706 - DNA, 20 bp, Artificial
  20-mer unique DNA sequence
ccaaccccatcccttttccg

SEQ ID NO: 7707 - DNA, 20 bp, Artificial
  20-mer unique DNA sequence
accaacaatccccgtgtccc

SEQ ID NO: 7708 - DNA, 20 bp, Artificial
  20-mer unique DNA sequence
aacatacggtcgtggcggct

SEQ ID NO: 7709 - DNA, 20 bp, Artificial
  20-mer unique DNA sequence
caacacggctactcgcgcag

SEQ ID NO: 7710 - DNA, 20 bp, Artificial
  20-mer unique DNA sequence
catcgcaaataaccccccgt

SEQ ID NO: 7711 - DNA, 20 bp, Artificial
  20-mer unique DNA sequence
gggactgatgggcgacggac

SEQ ID NO: 7712 - DNA, 20 bp, Artificial
  20-mer unique DNA sequence
tgctaaaaccaccgccacgc

SEQ ID NO: 7713 - DNA, 20 bp, Artificial
  20-mer unique DNA sequence
acgccatgcccccaccagat

SEQ ID NO: 7714 - DNA, 20 bp, Artificial
  20-mer unique DNA sequence
gcgacagtagagggggcgca

SEQ ID NO: 7715 - DNA, 20 bp, Artificial
  20-mer unique DNA sequence
aagacggacacaccgccctg

SEQ ID NO: 7716 - DNA, 20 bp, Artificial
  20-mer unique DNA sequence
ggcgccccatcctgcatctt

SEQ ID NO: 7717 - DNA, 20 bp, Artificial
  20-mer unique DNA sequence
cgcggccccttatacgtcag

SEQ ID NO: 7718 - DNA, 20 bp, Artificial
  20-mer unique DNA sequence
tcagtcatcggcgggcaatt

SEQ ID NO: 7719 - DNA, 20 bp, Artificial
  20-mer unique DNA sequence
gtgggtcgccgttgattcgc

SEQ ID NO: 7720 - DNA, 20 bp, Artificial
  20-mer unique DNA sequence
ggcgacggagcagctaggag

SEQ ID NO: 7721 - DNA, 20 bp, Artificial
  20-mer unique DNA sequence
ccataaggatcgccaacgcc

SEQ ID NO: 7722 - DNA, 20 bp, Artificial
  20-mer unique DNA sequence
tctgagggggtccggtgtcg

SEQ ID NO: 7723 - DNA, 20 bp, Artificial
  20-mer unique DNA sequence
agcagtatcggccggcattc

SEQ ID NO: 7724 - DNA, 20 bp, Artificial
  20-mer unique DNA sequence
ctgttcgatctcccgctccg

SEQ ID NO: 7725 - DNA, 20 bp, Artificial
  20-mer unique DNA sequence
tccggttggggcttgagaat

SEQ ID NO: 7726 - DNA, 20 bp, Artificial
  20-mer unique DNA sequence
actcgtgccgggttgactcg

SEQ ID NO: 7727 - DNA, 20 bp, Artificial
  20-mer unique DNA sequence
cccacttattcggccgagcg

SEQ ID NO: 7728 - DNA, 20 bp, Artificial
  20-mer unique DNA sequence
ccgtgtctagctggggccat

SEQ ID NO: 7729 - DNA, 20 bp, Artificial
  20-mer unique DNA sequence
atcgggtgtatcgcacgaca

SEQ ID NO: 7730 - DNA, 20 bp, Artificial
  20-mer unique DNA sequence
acattacaccaccggcgccc

SEQ ID NO: 7731 - DNA, 20 bp, Artificial
  20-mer unique DNA sequence
aaccccggagcgtcaggata

SEQ ID NO: 7732 - DNA, 20 bp, Artificial
  20-mer unique DNA sequence
cttcgcccgccacctaccct

SEQ ID NO: 7733 - DNA, 20 bp, Artificial
  20-mer unique DNA sequence
cgcacaccaccatcaaccgc

SEQ ID NO: 7734 - DNA, 20 bp, Artificial
  20-mer unique DNA sequence
gggaaaggcgagacacaggc

SEQ ID NO: 7735 - DNA, 20 bp, Artificial
  20-mer unique DNA sequence
ggcccacgtaaatcgcgaca

SEQ ID NO: 7736 - DNA, 20 bp, Artificial
  20-mer unique DNA sequence
accacactatgtcgtggccc

SEQ ID NO: 7737 - DNA, 20 bp, Artificial
  20-mer unique DNA sequence
aatcggtggtccgatcctgg

SEQ ID NO: 7738 - DNA, 20 bp, Artificial
  20-mer unique DNA sequence
gggaccaagcggggagaaaa

SEQ ID NO: 7739 - DNA, 20 bp, Artificial
  20-mer unique DNA sequence
ccaagccggcagcgaatcag

SEQ ID NO: 7740 - DNA, 20 bp, Artificial
  20-mer unique DNA sequence
tccctccggctccatccttt

SEQ ID NO: 7741 - DNA, 20 bp, Artificial
  20-mer unique DNA sequence
ccgtgctctgcctcgtttcg

SEQ ID NO: 7742 - DNA, 20 bp, Artificial
  20-mer unique DNA sequence
gtggcgccggtttcttgtca

SEQ ID NO: 7743 - DNA, 20 bp, Artificial
  20-mer unique DNA sequence
aaccggcgccctcctactgc

SEQ ID NO: 7744 - DNA, 20 bp, Artificial
  20-mer unique DNA sequence
atgggcgttgtcggatgttg

SEQ ID NO: 7745 - DNA, 20 bp, Artificial
  20-mer unique DNA sequence
tgagttattggccgccggtt

SEQ ID NO: 7746 - DNA, 20 bp, Artificial
  20-mer unique DNA sequence
tggtactaggtcgaacggcg

SEQ ID NO: 7747 - DNA, 20 bp, Artificial
  20-mer unique DNA sequence
ttgagcgcatagactgccga

SEQ ID NO: 7748 - DNA, 20 bp, Artificial
  20-mer unique DNA sequence
ctggccgcaaccgcaaatac

SEQ ID NO: 7749 - DNA, 20 bp, Artificial
  20-mer unique DNA sequence
cacgtctgcgcggtctcaca

SEQ ID NO: 7750 - DNA, 20 bp, Artificial
  20-mer unique DNA sequence
cagccagcctccatcacgtg

SEQ ID NO: 7751 - DNA, 20 bp, Artificial
  20-mer unique DNA sequence
tgctttcattgctgcgggtt

SEQ ID NO: 7752 - DNA, 20 bp, Artificial
  20-mer unique DNA sequence
ctattccctcgccccccctt

SEQ ID NO: 7753 - DNA, 20 bp, Artificial
  20-mer unique DNA sequence
taggtggcagggaaggcgag

SEQ ID NO: 7754 - DNA, 20 bp, Artificial
  20-mer unique DNA sequence
accacaattcacctgcgggg

SEQ ID NO: 7755 - DNA, 20 bp, Artificial
  20-mer unique DNA sequence
ccaagattcgcggttcgcct

SEQ ID NO: 7756 - DNA, 20 bp, Artificial
  20-mer unique DNA sequence
gacaacgcccccctaaacgg

SEQ ID NO: 7757 - DNA, 20 bp, Artificial
  20-mer unique DNA sequence
cgccaaccgctcatcacctc

SEQ ID NO: 7758 - DNA, 20 bp, Artificial
  20-mer unique DNA sequence
ctctgcttgcgcggttgaac

SEQ ID NO: 7759 - DNA, 20 bp, Artificial
  20-mer unique DNA sequence
tggccttcacatcgccgcta

SEQ ID NO: 7760 - DNA, 20 bp, Artificial
  20-mer unique DNA sequence
cgttgcgcggtcagtttcat

SEQ ID NO: 7761 - DNA, 20 bp, Artificial
  20-mer unique DNA sequence
cgcaataagcagtggggcaa

SEQ ID NO: 7762 - DNA, 20 bp, Artificial
  20-mer unique DNA sequence
caaaacacccggacgcgaag

SEQ ID NO: 7763 - DNA, 20 bp, Artificial
  20-mer unique DNA sequence
tgggggttcgggagaggagt

SEQ ID NO: 7764 - DNA, 20 bp, Artificial
  20-mer unique DNA sequence
cagggtttcaggtttgcgcg

SEQ ID NO: 7765 - DNA, 20 bp, Artificial
  20-mer unique DNA sequence
ttgttacccccgccgacgtc

SEQ ID NO: 7766 - DNA, 20 bp, Artificial
  20-mer unique DNA sequence
tagggggccatgtgtgggac

SEQ ID NO: 7767 - DNA, 20 bp, Artificial
  20-mer unique DNA sequence
tcattggcagcaacgtgggt

SEQ ID NO: 7768 - DNA, 20 bp, Artificial
  20-mer unique DNA sequence
gtcaggcacgcaggaaaggc

SEQ ID NO: 7769 - DNA, 20 bp, Artificial
  20-mer unique DNA sequence
tggggcgcgcttaggatttc

SEQ ID NO: 7770 - DNA, 20 bp, Artificial
  20-mer unique DNA sequence
gcttccccaccatgtacgca

SEQ ID NO: 7771 - DNA, 20 bp, Artificial
  20-mer unique DNA sequence
cgcaaccgcaacaatcgcta

SEQ ID NO: 7772 - DNA, 20 bp, Artificial
  20-mer unique DNA sequence
cctctccgttggaccgaaca

SEQ ID NO: 7773 - DNA, 20 bp, Artificial
  20-mer unique DNA sequence
cggcatatcgcgctggacta

SEQ ID NO: 7774 - DNA, 20 bp, Artificial
  20-mer unique DNA sequence
ccccctccgttaatccagca

SEQ ID NO: 7775 - DNA, 20 bp, Artificial
  20-mer unique DNA sequence
cgccgacatgcccgtacttg

SEQ ID NO: 7776 - DNA, 20 bp, Artificial
  20-mer unique DNA sequence
acccccctgactgacacccc

SEQ ID NO: 7777 - DNA, 20 bp, Artificial
  20-mer unique DNA sequence
agtggtctgacacgcgtcct

SEQ ID NO: 7778 - DNA, 20 bp, Artificial
  20-mer unique DNA sequence
cccattccgaccgtccatcg

SEQ ID NO: 7779 - DNA, 20 bp, Artificial
  20-mer unique DNA sequence
ctcaggtgttggggaagcgg

SEQ ID NO: 7780 - DNA, 20 bp, Artificial
  20-mer unique DNA sequence
ttctctgcaaggcctcccag

SEQ ID NO: 7781 - DNA, 20 bp, Artificial
  20-mer unique DNA sequence
aagcgaggggggagggttca

SEQ ID NO: 7782 - DNA, 20 bp, Artificial
  20-mer unique DNA sequence
aaacgcggcctccctaacca

SEQ ID NO: 7783 - DNA, 20 bp, Artificial
  20-mer unique DNA sequence
ggttcttgcatgttcccggg

SEQ ID NO: 7784 - DNA, 20 bp, Artificial
  20-mer unique DNA sequence
acgagagggaaggcgaaaaa

SEQ ID NO: 7785 - DNA, 20 bp, Artificial
  20-mer unique DNA sequence
cggctcccgtctggctgtta

SEQ ID NO: 7786 - DNA, 20 bp, Artificial
  20-mer unique DNA sequence
gtctcctcgcccccacccaa

SEQ ID NO: 7787 - DNA, 20 bp, Artificial
  20-mer unique DNA sequence
tccattgcgcggtcactttg

SEQ ID NO: 7788 - DNA, 20 bp, Artificial
  20-mer unique DNA sequence
agcacaatactccccgccga

SEQ ID NO: 7789 - DNA, 20 bp, Artificial
  20-mer unique DNA sequence
gtacggccaacgcaaagggt

SEQ ID NO: 7790 - DNA, 20 bp, Artificial
  20-mer unique DNA sequence
cgggcgaatgttgggatgag

SEQ ID NO: 7791 - DNA, 20 bp, Artificial
  20-mer unique DNA sequence
cacacaagcgctgcatcccc

SEQ ID NO: 7792 - DNA, 20 bp, Artificial
  20-mer unique DNA sequence
tggaaatctgggggtggact

SEQ ID NO: 7793 - DNA, 20 bp, Artificial
  20-mer unique DNA sequence
taacccccgcaccactgctt

SEQ ID NO: 7794 - DNA, 20 bp, Artificial
  20-mer unique DNA sequence
atccgtcctacccgccacca

SEQ ID NO: 7795 - DNA, 20 bp, Artificial
  20-mer unique DNA sequence
tgccttttggcgggcttatc

SEQ ID NO: 7796 - DNA, 20 bp, Artificial
  20-mer unique DNA sequence
aagcgcaaggtaccggaggc

SEQ ID NO: 7797 - DNA, 20 bp, Artificial
  20-mer unique DNA sequence
cggggtgggtaatggttcga

SEQ ID NO: 7798 - DNA, 20 bp, Artificial
  20-mer unique DNA sequence
agagtggaagcagggtcggc

SEQ ID NO: 7799 - DNA, 20 bp, Artificial
  20-mer unique DNA sequence
cctcagcaaagcgtcccacc

SEQ ID NO: 7800 - DNA, 20 bp, Artificial
  20-mer unique DNA sequence
gtgcgggatctactggggca

SEQ ID NO: 7801 - DNA, 20 bp, Artificial
  20-mer unique DNA sequence
accgcttggcatctggggat

SEQ ID NO: 7802 - DNA, 20 bp, Artificial
  20-mer unique DNA sequence
gaaaccgatgctgcccctcc

SEQ ID NO: 7803 - DNA, 20 bp, Artificial
  20-mer unique DNA sequence
ctccccccgcatgacgatta

SEQ ID NO: 7804 - DNA, 20 bp, Artificial
  20-mer unique DNA sequence
gtggcgcctgggggtatcga

SEQ ID NO: 7805 - DNA, 20 bp, Artificial
  20-mer unique DNA sequence
aacgtgcgaccgactgtcca

SEQ ID NO: 7806 - DNA, 20 bp, Artificial
  20-mer unique DNA sequence
gttacaggacgggcgagggg

SEQ ID NO: 7807 - DNA, 20 bp, Artificial
  20-mer unique DNA sequence
ccttgggtttgttagcgcgc

SEQ ID NO: 7808 - DNA, 20 bp, Artificial
  20-mer unique DNA sequence
tggctggcgttttttggtcg

SEQ ID NO: 7809 - DNA, 20 bp, Artificial
  20-mer unique DNA sequence
gggggggtatttttccagcg

SEQ ID NO: 7810 - DNA, 20 bp, Artificial
  20-mer unique DNA sequence
ccatcctccccctctgcctg

SEQ ID NO: 7811 - DNA, 20 bp, Artificial
  20-mer unique DNA sequence
tattatgcccccacgacccc

SEQ ID NO: 7812 - DNA, 20 bp, Artificial
  20-mer unique DNA sequence
gggtgatgagagcgggcgtg

SEQ ID NO: 7813 - DNA, 20 bp, Artificial
  20-mer unique DNA sequence
gagggggggtgtatttggcg

SEQ ID NO: 7814 - DNA, 20 bp, Artificial
  20-mer unique DNA sequence
gcggcgatggtggcaagtta

SEQ ID NO: 7815 - DNA, 20 bp, Artificial
  20-mer unique DNA sequence
ggagaggtgtttgcgccgga

SEQ ID NO: 7816 - DNA, 20 bp, Artificial
  20-mer unique DNA sequence
cgcacgtcgggtaggtttgg

SEQ ID NO: 7817 - DNA, 20 bp, Artificial
  20-mer unique DNA sequence
gctcgggcgatccacatacg

SEQ ID NO: 7818 - DNA, 20 bp, Artificial
  20-mer unique DNA sequence
gcgtctcttgtccggggtgg

SEQ ID NO: 7819 - DNA, 20 bp, Artificial
  20-mer unique DNA sequence
agtcgtgcctagcgtctggt

SEQ ID NO: 7820 - DNA, 20 bp, Artificial
  20-mer unique DNA sequence
gctgaatatggggggtgcgg

SEQ ID NO: 7821 - DNA, 20 bp, Artificial
  20-mer unique DNA sequence
ggtgtattcgaggaccgcca

SEQ ID NO: 7822 - DNA, 20 bp, Artificial
  20-mer unique DNA sequence
tcgccccctgttttactgcg

SEQ ID NO: 7823 - DNA, 20 bp, Artificial
  20-mer unique DNA sequence
tcaccaccccttatgccccc

SEQ ID NO: 7824 - DNA, 20 bp, Artificial
  20-mer unique DNA sequence
ttgggttgttcccgttccga

SEQ ID NO: 7825 - DNA, 20 bp, Artificial
  20-mer unique DNA sequence
tgggtcaagagggggtcgga

SEQ ID NO: 7826 - DNA, 20 bp, Artificial
  20-mer unique DNA sequence
acaggccggcaacgggatta

SEQ ID NO: 7827 - DNA, 20 bp, Artificial
  20-mer unique DNA sequence
atattgacccgccgaagcca

SEQ ID NO: 7828 - DNA, 20 bp, Artificial
  20-mer unique DNA sequence
gcggttcgtctctggttgcc

SEQ ID NO: 7829 - DNA, 20 bp, Artificial
  20-mer unique DNA sequence
agcgcaacaactccgtccct

SEQ ID NO: 7830 - DNA, 20 bp, Artificial
  20-mer unique DNA sequence
gcacaggggaacgcattaca

SEQ ID NO: 7831 - DNA, 20 bp, Artificial
  20-mer unique DNA sequence
catcgataagcccccccccc

SEQ ID NO: 7832 - DNA, 20 bp, Artificial
  20-mer unique DNA sequence
tgctcggccgtcgcttataa

SEQ ID NO: 7833 - DNA, 20 bp, Artificial
  20-mer unique DNA sequence
cccaaagatctcccaacgcg

SEQ ID NO: 7834 - DNA, 20 bp, Artificial
  20-mer unique DNA sequence
cctttttcggccgcattgac

SEQ ID NO: 7835 - DNA, 20 bp, Artificial
  20-mer unique DNA sequence
acatttcgctggggggctcg

SEQ ID NO: 7836 - DNA, 20 bp, Artificial
  20-mer unique DNA sequence
ctcctcgcctgcaaaacccg

SEQ ID NO: 7837 - DNA, 20 bp, Artificial
  20-mer unique DNA sequence
ttggcgggaagtgcggagtg

SEQ ID NO: 7838 - DNA, 20 bp, Artificial
  20-mer unique DNA sequence
tttgccaccacacccactcg

SEQ ID NO: 7839 - DNA, 20 bp, Artificial
  20-mer unique DNA sequence
cgggggccaggtgagaaaac

SEQ ID NO: 7840 - DNA, 20 bp, Artificial
  20-mer unique DNA sequence
tcggaggcgtacaccgggag

SEQ ID NO: 7841 - DNA, 20 bp, Artificial
  20-mer unique DNA sequence
ccatgttgaaacccccgctc

SEQ ID NO: 7842 - DNA, 20 bp, Artificial
  20-mer unique DNA sequence
tggccggcatctctgttcgt

SEQ ID NO: 7843 - DNA, 20 bp, Artificial
  20-mer unique DNA sequence
agcgtttacccccagatccg

SEQ ID NO: 7844 - DNA, 20 bp, Artificial
  20-mer unique DNA sequence
cagccccccctaccttggaa

SEQ ID NO: 7845 - DNA, 20 bp, Artificial
  20-mer unique DNA sequence
ggtcggtcgctgggcttaac

SEQ ID NO: 7846 - DNA, 20 bp, Artificial
  20-mer unique DNA sequence
ggggaggagcaacggaggaa

SEQ ID NO: 7847 - DNA, 20 bp, Artificial
  20-mer unique DNA sequence
tcgaacagccgccaccatag

SEQ ID NO: 7848 - DNA, 20 bp, Artificial
  20-mer unique DNA sequence
ccgtgtcgtgtgccgactta

SEQ ID NO: 7849 - DNA, 20 bp, Artificial
  20-mer unique DNA sequence
gggctgcggtacgtggattg

SEQ ID NO: 7850 - DNA, 20 bp, Artificial
  20-mer unique DNA sequence
atcttggctttgcgcggttg

SEQ ID NO: 7851 - DNA, 20 bp, Artificial
  20-mer unique DNA sequence
accatcaagccgacccccaa

SEQ ID NO: 7852 - DNA, 20 bp, Artificial
  20-mer unique DNA sequence
gcacccctccaccgaccata

SEQ ID NO: 7853 - DNA, 20 bp, Artificial
  20-mer unique DNA sequence
tgtggcggaaagaacggctg

SEQ ID NO: 7854 - DNA, 20 bp, Artificial
  20-mer unique DNA sequence
aataccccgttgcgctgtcc

SEQ ID NO: 7855 - DNA, 20 bp, Artificial
  20-mer unique DNA sequence
agactacaggaggcgcggca

SEQ ID NO: 7856 - DNA, 20 bp, Artificial
  20-mer unique DNA sequence
gatgactgggacgggtggga

SEQ ID NO: 7857 - DNA, 20 bp, Artificial
  20-mer unique DNA sequence
cggttatgcgtgtggcgtgg

SEQ ID NO: 7858 - DNA, 20 bp, Artificial
  20-mer unique DNA sequence
ttggtgcctgccttccgttc

SEQ ID NO: 7859 - DNA, 20 bp, Artificial
  20-mer unique DNA sequence
tttctttcgcgcaacgtccg

SEQ ID NO: 7860 - DNA, 20 bp, Artificial
  20-mer unique DNA sequence
ccggttccccactccctgtt

SEQ ID NO: 7861 - DNA, 20 bp, Artificial
  20-mer unique DNA sequence
gtgggtgggggtgcagttga

SEQ ID NO: 7862 - DNA, 20 bp, Artificial
  20-mer unique DNA sequence
gcaagctgtcccccagaaag

SEQ ID NO: 7863 - DNA, 20 bp, Artificial
  20-mer unique DNA sequence
ctgttttccgcgctccgacc

SEQ ID NO: 7864 - DNA, 20 bp, Artificial
  20-mer unique DNA sequence
ctccacacagcgaagcccca

SEQ ID NO: 7865 - DNA, 20 bp, Artificial
  20-mer unique DNA sequence
gggcatccgggagttgatct

SEQ ID NO: 7866 - DNA, 20 bp, Artificial
  20-mer unique DNA sequence
catccccgccctggttttta

SEQ ID NO: 7867 - DNA, 20 bp, Artificial
  20-mer unique DNA sequence
gcgtgggggacggagttgtg

SEQ ID NO: 7868 - DNA, 20 bp, Artificial
  20-mer unique DNA sequence
tggacgctaggccgagttct

SEQ ID NO: 7869 - DNA, 20 bp, Artificial
  20-mer unique DNA sequence
gcaggagtcgcactggagtt

SEQ ID NO: 7870 - DNA, 20 bp, Artificial
  20-mer unique DNA sequence
ccggcgtggttgtgtcatgt

SEQ ID NO: 7871 - DNA, 20 bp, Artificial
  20-mer unique DNA sequence
atctccaccgtctctgcccg

SEQ ID NO: 7872 - DNA, 20 bp, Artificial
  20-mer unique DNA sequence
accccgtcactgatcccaac

SEQ ID NO: 7873 - DNA, 20 bp, Artificial
  20-mer unique DNA sequence
ttaatctgtgccatgcccgc

SEQ ID NO: 7874 - DNA, 20 bp, Artificial
  20-mer unique DNA sequence
catccggaccaccccaacct

SEQ ID NO: 7875 - DNA, 20 bp, Artificial
  20-mer unique DNA sequence
cggcttggacatggttgggt

SEQ ID NO: 7876 - DNA, 20 bp, Artificial
  20-mer unique DNA sequence
agatgatgttggcgtccccc

SEQ ID NO: 7877 - DNA, 20 bp, Artificial
  20-mer unique DNA sequence
accggggaggggtctttttc

SEQ ID NO: 7878 - DNA, 20 bp, Artificial
  20-mer unique DNA sequence
agactgatttgcggcagggc

SEQ ID NO: 7879 - DNA, 20 bp, Artificial
  20-mer unique DNA sequence
atcatttgggttgtcggggc

SEQ ID NO: 7880 - DNA, 20 bp, Artificial
  20-mer unique DNA sequence
ggctagcacgtaacccgtca

SEQ ID NO: 7881 - DNA, 20 bp, Artificial
  20-mer unique DNA sequence
gtcgccaggacgtgctaaga

SEQ ID NO: 7882 - DNA, 20 bp, Artificial
  20-mer unique DNA sequence
tctgcggaaccgtgtggcat

SEQ ID NO: 7883 - DNA, 20 bp, Artificial
  20-mer unique DNA sequence
cttgtcgctgccgtccctgg

SEQ ID NO: 7884 - DNA, 20 bp, Artificial
  20-mer unique DNA sequence
cccacgcgcaatagcatcat

SEQ ID NO: 7885 - DNA, 20 bp, Artificial
  20-mer unique DNA sequence
tcggcgtgtctttgagcggg

SEQ ID NO: 7886 - DNA, 20 bp, Artificial
  20-mer unique DNA sequence
tggctcgggtctttacggga

SEQ ID NO: 7887 - DNA, 20 bp, Artificial
  20-mer unique DNA sequence
tggtcaatgggagtggctgc

SEQ ID NO: 7888 - DNA, 20 bp, Artificial
  20-mer unique DNA sequence
tcaatatgccctccccaccc

SEQ ID NO: 7889 - DNA, 20 bp, Artificial
  20-mer unique DNA sequence
acctccgcctgtcccctcat

SEQ ID NO: 7890 - DNA, 20 bp, Artificial
  20-mer unique DNA sequence
attgctccggcgccagtttt

SEQ ID NO: 7891 - DNA, 20 bp, Artificial
  20-mer unique DNA sequence
acgcaacaagtccccaagcc

SEQ ID NO: 7892 - DNA, 20 bp, Artificial
  20-mer unique DNA sequence
ggtcatttcgcaggtgatca

SEQ ID NO: 7893 - DNA, 20 bp, Artificial
  20-mer unique DNA sequence
ggtgcggccgagaaacaatg

SEQ ID NO: 7894 - DNA, 20 bp, Artificial
  20-mer unique DNA sequence
agatggcgttgcgttcggtt

SEQ ID NO: 7895 - DNA, 20 bp, Artificial
  20-mer unique DNA sequence
gccactcaccggaccaacga

SEQ ID NO: 7896 - DNA, 20 bp, Artificial
  20-mer unique DNA sequence
atatgtttggacgcggtgcg

SEQ ID NO: 7897 - DNA, 20 bp, Artificial
  20-mer unique DNA sequence
agtccaggagacggcgctcg

SEQ ID NO: 7898 - DNA, 20 bp, Artificial
  20-mer unique DNA sequence
cgaatgggggcgagcagtac

SEQ ID NO: 7899 - DNA, 20 bp, Artificial
  20-mer unique DNA sequence
ttgatcggccgttgtttcca

SEQ ID NO: 7900 - DNA, 20 bp, Artificial
  20-mer unique DNA sequence
gtgggggggctatctctgcg

SEQ ID NO: 7901 - DNA, 20 bp, Artificial
  20-mer unique DNA sequence
cgctccgcccacgaatacca

SEQ ID NO: 7902 - DNA, 20 bp, Artificial
  20-mer unique DNA sequence
tccggaatgggcgactacgt

SEQ ID NO: 7903 - DNA, 20 bp, Artificial
  20-mer unique DNA sequence
atatggcttcggcagggggc

SEQ ID NO: 7904 - DNA, 20 bp, Artificial
  20-mer unique DNA sequence
cgaactcaaaaaggggcgct

SEQ ID NO: 7905 - DNA, 20 bp, Artificial
  20-mer unique DNA sequence
catgaggcagaggacggacc

SEQ ID NO: 7906 - DNA, 20 bp, Artificial
  20-mer unique DNA sequence
tttcctcgacccccctccat

SEQ ID NO: 7907 - DNA, 20 bp, Artificial
  20-mer unique DNA sequence
tcagcatgtttgggtggcag

SEQ ID NO: 7908 - DNA, 20 bp, Artificial
  20-mer unique DNA sequence
gcgaagcaggagggttttgg

SEQ ID NO: 7909 - DNA, 20 bp, Artificial
  20-mer unique DNA sequence
tcaaccgcatctcgccccct

SEQ ID NO: 7910 - DNA, 20 bp, Artificial
  20-mer unique DNA sequence
caccatcgatccctccccaa

SEQ ID NO: 7911 - DNA, 20 bp, Artificial
  20-mer unique DNA sequence
tgcaatgggttaggtggggc

SEQ ID NO: 7912 - DNA, 20 bp, Artificial
  20-mer unique DNA sequence
acatggagtgtccagtggcg

SEQ ID NO: 7913 - DNA, 20 bp, Artificial
  20-mer unique DNA sequence
ggggcaaccggaaagagctg

SEQ ID NO: 7914 - DNA, 20 bp, Artificial
  20-mer unique DNA sequence
caccacacgttcccctccgg

SEQ ID NO: 7915 - DNA, 20 bp, Artificial
  20-mer unique DNA sequence
cgggaggtgcagtggtgtcg

SEQ ID NO: 7916 - DNA, 20 bp, Artificial
  20-mer unique DNA sequence
cgtgggacagggcaggtctg

SEQ ID NO: 7917 - DNA, 20 bp, Artificial
  20-mer unique DNA sequence
gaggagcggaccgaagtgcg

SEQ ID NO: 7918 - DNA, 20 bp, Artificial
  20-mer unique DNA sequence
accaggtaggcgtcggatga

SEQ ID NO: 7919 - DNA, 20 bp, Artificial
  20-mer unique DNA sequence
tagctgtgtcgcgtcgatga

SEQ ID NO: 7920 - DNA, 20 bp, Artificial
  20-mer unique DNA sequence
actcaaacgcgcgcaagtgg

SEQ ID NO: 7921 - DNA, 20 bp, Artificial
  20-mer unique DNA sequence
acccggcgcaccgtaagctc

SEQ ID NO: 7922 - DNA, 20 bp, Artificial
  20-mer unique DNA sequence
ataacggggcggatcggagg

SEQ ID NO: 7923 - DNA, 20 bp, Artificial
  20-mer unique DNA sequence
gcaacccgaacaggccacga

SEQ ID NO: 7924 - DNA, 20 bp, Artificial
  20-mer unique DNA sequence
aaaggaatgagtcgcgcccg

SEQ ID NO: 7925 - DNA, 20 bp, Artificial
  20-mer unique DNA sequence
acaggacggcctcacgcaag

SEQ ID NO: 7926 - DNA, 20 bp, Artificial
  20-mer unique DNA sequence
agcccatgaccaacgacccc

SEQ ID NO: 7927 - DNA, 20 bp, Artificial
  20-mer unique DNA sequence
ctgcggtccccgtgtcgatt

SEQ ID NO: 7928 - DNA, 20 bp, Artificial
  20-mer unique DNA sequence
tttctcgaccgctcctccgg

SEQ ID NO: 7929 - DNA, 20 bp, Artificial
  20-mer unique DNA sequence
acctgcggttacgcgaacta

SEQ ID NO: 7930 - DNA, 20 bp, Artificial
  20-mer unique DNA sequence
tgaacgatccccccctccat

SEQ ID NO: 7931 - DNA, 20 bp, Artificial
  20-mer unique DNA sequence
acccgcgccgtgctacaata

SEQ ID NO: 7932 - DNA, 20 bp, Artificial
  20-mer unique DNA sequence
tgtactcgcccctccacggg

SEQ ID NO: 7933 - DNA, 20 bp, Artificial
  20-mer unique DNA sequence
cccagcgatgagttgcgacc

SEQ ID NO: 7934 - DNA, 20 bp, Artificial
  20-mer unique DNA sequence
aacccacgcggcacttgaac

SEQ ID NO: 7935 - DNA, 20 bp, Artificial
  20-mer unique DNA sequence
ttagcaccgccctgacccgt

SEQ ID NO: 7936 - DNA, 20 bp, Artificial
  20-mer unique DNA sequence
acgagacgggcagcggtaga

SEQ ID NO: 7937 - DNA, 20 bp, Artificial
  20-mer unique DNA sequence
tgttggtcgccttgtcggtg

SEQ ID NO: 7938 - DNA, 20 bp, Artificial
  20-mer unique DNA sequence
tgccgcttcttctcttcgca

SEQ ID NO: 7939 - DNA, 20 bp, Artificial
  20-mer unique DNA sequence
atggcaccctcctggcgaat

SEQ ID NO: 7940 - DNA, 20 bp, Artificial
  20-mer unique DNA sequence
tcgcgcgcgctctcactaaa

SEQ ID NO: 7941 - DNA, 20 bp, Artificial
  20-mer unique DNA sequence
accattaggcggcaacccac

SEQ ID NO: 7942 - DNA, 20 bp, Artificial
  20-mer unique DNA sequence
cactttccgatatccgcgcg

SEQ ID NO: 7943 - DNA, 20 bp, Artificial
  20-mer unique DNA sequence
aagagcccaatgccccgacg

SEQ ID NO: 7944 - DNA, 20 bp, Artificial
  20-mer unique DNA sequence
ccgtgcaggggaatatggcg

SEQ ID NO: 7945 - DNA, 20 bp, Artificial
  20-mer unique DNA sequence
cctgctcgaaatgctccgtg

SEQ ID NO: 7946 - DNA, 20 bp, Artificial
  20-mer unique DNA sequence
gggagggccggagaagacca

SEQ ID NO: 7947 - DNA, 20 bp, Artificial
  20-mer unique DNA sequence
gctggggacttcgtgggtac

SEQ ID NO: 7948 - DNA, 20 bp, Artificial
  20-mer unique DNA sequence
ggggcgcctcaaaaccaaca

SEQ ID NO: 7949 - DNA, 20 bp, Artificial
  20-mer unique DNA sequence
tcgcagtccgcttcacagtg

SEQ ID NO: 7950 - DNA, 20 bp, Artificial
  20-mer unique DNA sequence
gttcgtggttggggcatgcg

SEQ ID NO: 7951 - DNA, 20 bp, Artificial
  20-mer unique DNA sequence
atgcccgcccactcaaactg

SEQ ID NO: 7952 - DNA, 20 bp, Artificial
  20-mer unique DNA sequence
aagggcacgggattgggctc

SEQ ID NO: 7953 - DNA, 20 bp, Artificial
  20-mer unique DNA sequence
tacggaaaagcatggggcct

SEQ ID NO: 7954 - DNA, 20 bp, Artificial
  20-mer unique DNA sequence
acaaggcgtggctggggaac

SEQ ID NO: 7955 - DNA, 20 bp, Artificial
  20-mer unique DNA sequence
gccttgcgtggggcagttct

SEQ ID NO: 7956 - DNA, 20 bp, Artificial
  20-mer unique DNA sequence
aatttcgccctccccagtga

SEQ ID NO: 7957 - DNA, 20 bp, Artificial
  20-mer unique DNA sequence
tcgtcccgctcttgcctctg

SEQ ID NO: 7958 - DNA, 20 bp, Artificial
  20-mer unique DNA sequence
tggggggcgtggagttaggc

SEQ ID NO: 7959 - DNA, 20 bp, Artificial
  20-mer unique DNA sequence
ccagccggatgtgcactttg

SEQ ID NO: 7960 - DNA, 20 bp, Artificial
  20-mer unique DNA sequence
gttccgggtgcgctccttta

SEQ ID NO: 7961 - DNA, 20 bp, Artificial
  20-mer unique DNA sequence
cccgagatcaccagacgccc

SEQ ID NO: 7962 - DNA, 20 bp, Artificial
  20-mer unique DNA sequence
cctggtgcctttccttgccg

SEQ ID NO: 7963 - DNA, 20 bp, Artificial
  20-mer unique DNA sequence
tccttcggcagcggtctttt

SEQ ID NO: 7964 - DNA, 20 bp, Artificial
  20-mer unique DNA sequence
gcagcccgtcagcttcgttg

SEQ ID NO: 7965 - DNA, 20 bp, Artificial
  20-mer unique DNA sequence
cttgaacgccctagccccca

SEQ ID NO: 7966 - DNA, 20 bp, Artificial
  20-mer unique DNA sequence
ttggtcgagggcggagggta

SEQ ID NO: 7967 - DNA, 20 bp, Artificial
  20-mer unique DNA sequence
ccatgagcgacggcttttga

SEQ ID NO: 7968 - DNA, 20 bp, Artificial
  20-mer unique DNA sequence
cacgaaatgccccaacccat

SEQ ID NO: 7969 - DNA, 20 bp, Artificial
  20-mer unique DNA sequence
tagcgatttggtgggggacc

SEQ ID NO: 7970 - DNA, 20 bp, Artificial
  20-mer unique DNA sequence
gggtgccacggcttgaagat

SEQ ID NO: 7971 - DNA, 20 bp, Artificial
  20-mer unique DNA sequence
gccgccctacgtcaaatgct

SEQ ID NO: 7972 - DNA, 20 bp, Artificial
  20-mer unique DNA sequence
aagtaacgcgcacgccaatg

SEQ ID NO: 7973 - DNA, 20 bp, Artificial
  20-mer unique DNA sequence
gaccccgttagttggcccga

SEQ ID NO: 7974 - DNA, 20 bp, Artificial
  20-mer unique DNA sequence
tggggaatgcgcggaactgt

SEQ ID NO: 7975 - DNA, 20 bp, Artificial
  20-mer unique DNA sequence
cacctttgtcggccgtctca

SEQ ID NO: 7976 - DNA, 20 bp, Artificial
  20-mer unique DNA sequence
caatggaaagcacaccgcgg

SEQ ID NO: 7977 - DNA, 20 bp, Artificial
  20-mer unique DNA sequence
tcgggcgcatggatttactg

SEQ ID NO: 7978 - DNA, 20 bp, Artificial
  20-mer unique DNA sequence
gtccgcttcgctcctgtccg

SEQ ID NO: 7979 - DNA, 20 bp, Artificial
  20-mer unique DNA sequence
gactctccgcgcaccaacag

SEQ ID NO: 7980 - DNA, 20 bp, Artificial
  20-mer unique DNA sequence
cattgacccaacaccacgcc

SEQ ID NO: 7981 - DNA, 20 bp, Artificial
  20-mer unique DNA sequence
ggggcttcggtgcgttcgta

SEQ ID NO: 7982 - DNA, 20 bp, Artificial
  20-mer unique DNA sequence
ggctgcgagctgaaaggggt

SEQ ID NO: 7983 - DNA, 20 bp, Artificial
  20-mer unique DNA sequence
catagcgcccctcccgagtc

SEQ ID NO: 7984 - DNA, 20 bp, Artificial
  20-mer unique DNA sequence
accctccacgaatccgcacc

SEQ ID NO: 7985 - DNA, 20 bp, Artificial
  20-mer unique DNA sequence
tcgggaggtagaggatgcgc

SEQ ID NO: 7986 - DNA, 20 bp, Artificial
  20-mer unique DNA sequence
cggccagatcggggggtata

SEQ ID NO: 7987 - DNA, 20 bp, Artificial
  20-mer unique DNA sequence
ccgaaacgcgtgaagtgcat

SEQ ID NO: 7988 - DNA, 20 bp, Artificial
  20-mer unique DNA sequence
ctcctccgccgcacgaaaag

SEQ ID NO: 7989 - DNA, 20 bp, Artificial
  20-mer unique DNA sequence
gattaaagcgcgccccgagt

SEQ ID NO: 7990 - DNA, 20 bp, Artificial
  20-mer unique DNA sequence
gatgggacggatgcctggat

SEQ ID NO: 7991 - DNA, 20 bp, Artificial
  20-mer unique DNA sequence
caagagactgcacggcgccc

SEQ ID NO: 7992 - DNA, 20 bp, Artificial
  20-mer unique DNA sequence
aggttgaatagcgccacggg

SEQ ID NO: 7993 - DNA, 20 bp, Artificial
  20-mer unique DNA sequence
cagaatgagagtcagcgcgg

SEQ ID NO: 7994 - DNA, 20 bp, Artificial
  20-mer unique DNA sequence
ttgcgtggggggacagaggt

SEQ ID NO: 7995 - DNA, 20 bp, Artificial
  20-mer unique DNA sequence
ctggcacagctttggacggc

SEQ ID NO: 7996 - DNA, 20 bp, Artificial
  20-mer unique DNA sequence
ccccggcccaagccattaat

SEQ ID NO: 7997 - DNA, 20 bp, Artificial
  20-mer unique DNA sequence
cgtgcggcctaccaaattcc

SEQ ID NO: 7998 - DNA, 20 bp, Artificial
  20-mer unique DNA sequence
ccttgggggtatgcgtttgg

SEQ ID NO: 7999 - DNA, 20 bp, Artificial
  20-mer unique DNA sequence
cgggagatcgaccacaacgg

SEQ ID NO: 8000 - DNA, 20 bp, Artificial
  20-mer unique DNA sequence
tctttaatcccagcgccggt

SEQ ID NO: 8001 - DNA, 20 bp, Artificial
  20-mer unique DNA sequence
tctttgtgcccctttccgcc

SEQ ID NO: 8002 - DNA, 20 bp, Artificial
  20-mer unique DNA sequence
aacatttgacgcgacgggct

SEQ ID NO: 8003 - DNA, 20 bp, Artificial
  20-mer unique DNA sequence
tcggaggaggccagaaaaca

SEQ ID NO: 8004 - DNA, 20 bp, Artificial
  20-mer unique DNA sequence
cggcgcccatgaaaagagtg

SEQ ID NO: 8005 - DNA, 20 bp, Artificial
  20-mer unique DNA sequence
gggggaatgcgcttggaata

SEQ ID NO: 8006 - DNA, 20 bp, Artificial
  20-mer unique DNA sequence
tatggggacgtgttcggggt

SEQ ID NO: 8007 - DNA, 20 bp, Artificial
  20-mer unique DNA sequence
catcaaacggcgggaaggga

SEQ ID NO: 8008 - DNA, 20 bp, Artificial
  20-mer unique DNA sequence
tcactagcgccggcccaaaa

SEQ ID NO: 8009 - DNA, 20 bp, Artificial
  20-mer unique DNA sequence
atgattccaaccccccctcg

SEQ ID NO: 8010 - DNA, 20 bp, Artificial
  20-mer unique DNA sequence
cagccgagcgccgaattaga

SEQ ID NO: 8011 - DNA, 20 bp, Artificial
  20-mer unique DNA sequence
caccactccacgcattccgc

SEQ ID NO: 8012 - DNA, 20 bp, Artificial
  20-mer unique DNA sequence
aaccccgcctgtcttacccc

SEQ ID NO: 8013 - DNA, 20 bp, Artificial
  20-mer unique DNA sequence
aagggcagacaggcgggaca

SEQ ID NO: 8014 - DNA, 20 bp, Artificial
  20-mer unique DNA sequence
attggcgacgggtcttcagg

SEQ ID NO: 8015 - DNA, 20 bp, Artificial
  20-mer unique DNA sequence
tccgcccgtcgcaaagaatg

SEQ ID NO: 8016 - DNA, 20 bp, Artificial
  20-mer unique DNA sequence
agagatcccgcctgccaaca

SEQ ID NO: 8017 - DNA, 20 bp, Artificial
  20-mer unique DNA sequence
tccgccacgtccacctgaga

SEQ ID NO: 8018 - DNA, 20 bp, Artificial
  20-mer unique DNA sequence
ctgggtgaaacggctgctcc

SEQ ID NO: 8019 - DNA, 20 bp, Artificial
  20-mer unique DNA sequence
gggtaaatgcgccggtacgg

SEQ ID NO: 8020 - DNA, 20 bp, Artificial
  20-mer unique DNA sequence
tggcgtctcccctgttgtgg

SEQ ID NO: 8021 - DNA, 20 bp, Artificial
  20-mer unique DNA sequence
tggcagatgggggcgtggta

SEQ ID NO: 8022 - DNA, 20 bp, Artificial
  20-mer unique DNA sequence
gcctccactgtctccgcgat

SEQ ID NO: 8023 - DNA, 20 bp, Artificial
  20-mer unique DNA sequence
taggacggggctttatcgcg

SEQ ID NO: 8024 - DNA, 20 bp, Artificial
  20-mer unique DNA sequence
aatggatgtttgacgcggcg

SEQ ID NO: 8025 - DNA, 20 bp, Artificial
  20-mer unique DNA sequence
gtggacggcgaggtgtggct

SEQ ID NO: 8026 - DNA, 20 bp, Artificial
  20-mer unique DNA sequence
tgatgtctacagggcggcgc

SEQ ID NO: 8027 - DNA, 20 bp, Artificial
  20-mer unique DNA sequence
acgtgcgctaagcgagtacc

SEQ ID NO: 8028 - DNA, 20 bp, Artificial
  20-mer unique DNA sequence
cggtgcgggcgtctcataca

SEQ ID NO: 8029 - DNA, 20 bp, Artificial
  20-mer unique DNA sequence
aaacccccgtaaggcaagca

SEQ ID NO: 8030 - DNA, 20 bp, Artificial
  20-mer unique DNA sequence
gggccgcaggatcaagaatg

SEQ ID NO: 8031 - DNA, 20 bp, Artificial
  20-mer unique DNA sequence
aagtggcggggggttgagag

SEQ ID NO: 8032 - DNA, 20 bp, Artificial
  20-mer unique DNA sequence
gtgggccaaggggcgatgta

SEQ ID NO: 8033 - DNA, 20 bp, Artificial
  20-mer unique DNA sequence
agttccgctcacgctccctg

SEQ ID NO: 8034 - DNA, 20 bp, Artificial
  20-mer unique DNA sequence
gccttgtcactgcccgatcc

SEQ ID NO: 8035 - DNA, 20 bp, Artificial
  20-mer unique DNA sequence
ggtcgatgttgggtcaggca

SEQ ID NO: 8036 - DNA, 20 bp, Artificial
  20-mer unique DNA sequence
ttgcccggatataggcagcg

SEQ ID NO: 8037 - DNA, 20 bp, Artificial
  20-mer unique DNA sequence
attatgcggaccacgggacg

SEQ ID NO: 8038 - DNA, 20 bp, Artificial
  20-mer unique DNA sequence
tcaacggcaggaaaggggga

SEQ ID NO: 8039 - DNA, 20 bp, Artificial
  20-mer unique DNA sequence
ccggttattggcgtgctgga

SEQ ID NO: 8040 - DNA, 20 bp, Artificial
  20-mer unique DNA sequence
gatttgggccgcgggatatt

SEQ ID NO: 8041 - DNA, 20 bp, Artificial
  20-mer unique DNA sequence
aaggtccgcgacagaggaac

SEQ ID NO: 8042 - DNA, 20 bp, Artificial
  20-mer unique DNA sequence
catggggcgtgcgaggaatc

SEQ ID NO: 8043 - DNA, 20 bp, Artificial
  20-mer unique DNA sequence
ccacacggcctcggacttca

SEQ ID NO: 8044 - DNA, 20 bp, Artificial
  20-mer unique DNA sequence
gagagaggcaaatcgggccg

SEQ ID NO: 8045 - DNA, 20 bp, Artificial
  20-mer unique DNA sequence
ggctcattgcttgtgcgacg

SEQ ID NO: 8046 - DNA, 20 bp, Artificial
  20-mer unique DNA sequence
ttcattatttcgggggggca

SEQ ID NO: 8047 - DNA, 20 bp, Artificial
  20-mer unique DNA sequence
aggaaacaacaagggcgggg

SEQ ID NO: 8048 - DNA, 20 bp, Artificial
  20-mer unique DNA sequence
acggaatgaaagggccacgg

SEQ ID NO: 8049 - DNA, 20 bp, Artificial
  20-mer unique DNA sequence
atacttatcggcaccgcggg

SEQ ID NO: 8050 - DNA, 20 bp, Artificial
  20-mer unique DNA sequence
atttggtgcaggacggtggc

SEQ ID NO: 8051 - DNA, 20 bp, Artificial
  20-mer unique DNA sequence
gttacagagccggaccccca

SEQ ID NO: 8052 - DNA, 20 bp, Artificial
  20-mer unique DNA sequence
ttcagtgcgttcggggctta

SEQ ID NO: 8053 - DNA, 20 bp, Artificial
  20-mer unique DNA sequence
aaaaagagtggcgcgaagcc

SEQ ID NO: 8054 - DNA, 20 bp, Artificial
  20-mer unique DNA sequence
ggggcggttctttgagttgc

SEQ ID NO: 8055 - DNA, 20 bp, Artificial
  20-mer unique DNA sequence
tgccccgtgtctcttcgttg

SEQ ID NO: 8056 - DNA, 20 bp, Artificial
  20-mer unique DNA sequence
aggacatcacggacacgcgg

SEQ ID NO: 8057 - DNA, 20 bp, Artificial
  20-mer unique DNA sequence
cgagccgagattgcctgcac

SEQ ID NO: 8058 - DNA, 20 bp, Artificial
  20-mer unique DNA sequence
gcagccactccctatccccg

SEQ ID NO: 8059 - DNA, 20 bp, Artificial
  20-mer unique DNA sequence
tcgggatcagccagtcgttg

SEQ ID NO: 8060 - DNA, 20 bp, Artificial
  20-mer unique DNA sequence
tgacctccgcgactgcaatt

SEQ ID NO: 8061 - DNA, 20 bp, Artificial
  20-mer unique DNA sequence
cgaacgaattgggccgaggt

SEQ ID NO: 8062 - DNA, 20 bp, Artificial
  20-mer unique DNA sequence
cggcaccgcggataattgtc

SEQ ID NO: 8063 - DNA, 20 bp, Artificial
  20-mer unique DNA sequence
gcgggccttgccatgacttt

SEQ ID NO: 8064 - DNA, 20 bp, Artificial
  20-mer unique DNA sequence
tgtttatcggcggggggcct

SEQ ID NO: 8065 - DNA, 20 bp, Artificial
  20-mer unique DNA sequence
atagcgcgaggtcacagggc

SEQ ID NO: 8066 - DNA, 20 bp, Artificial
  20-mer unique DNA sequence
agggcgggctggaggatgag

SEQ ID NO: 8067 - DNA, 20 bp, Artificial
  20-mer unique DNA sequence
ttctgccctttacccagccg

SEQ ID NO: 8068 - DNA, 20 bp, Artificial
  20-mer unique DNA sequence
actcttggccgatctgcgtg

SEQ ID NO: 8069 - DNA, 20 bp, Artificial
  20-mer unique DNA sequence
atctctcgggtagacggcca

SEQ ID NO: 8070 - DNA, 20 bp, Artificial
  20-mer unique DNA sequence
ggccctcttcatgcaatccg

SEQ ID NO: 8071 - DNA, 20 bp, Artificial
  20-mer unique DNA sequence
tacaggaggggaccggcgag

SEQ ID NO: 8072 - DNA, 20 bp, Artificial
  20-mer unique DNA sequence
ctgggctagtcgggcaaggg

SEQ ID NO: 8073 - DNA, 20 bp, Artificial
  20-mer unique DNA sequence
atgatccgccaaccagcacg

SEQ ID NO: 8074 - DNA, 20 bp, Artificial
  20-mer unique DNA sequence
cctattcggttcctctgccc

SEQ ID NO: 8075 - DNA, 20 bp, Artificial
  20-mer unique DNA sequence
gtttgccgctttcgcctgtg

SEQ ID NO: 8076 - DNA, 20 bp, Artificial
  20-mer unique DNA sequence
gcctgaccgcctacgccaaa

SEQ ID NO: 8077 - DNA, 20 bp, Artificial
  20-mer unique DNA sequence
ggcggggtgaggggagaatt

SEQ ID NO: 8078 - DNA, 20 bp, Artificial
  20-mer unique DNA sequence
gcgaaaggcgaaatagcggt

SEQ ID NO: 8079 - DNA, 20 bp, Artificial
  20-mer unique DNA sequence
agtgggggacggacggcaac

SEQ ID NO: 8080 - DNA, 20 bp, Artificial
  20-mer unique DNA sequence
aataccacacgaaccgcccg

SEQ ID NO: 8081 - DNA, 20 bp, Artificial
  20-mer unique DNA sequence
tctccccgcagccacacctt

SEQ ID NO: 8082 - DNA, 20 bp, Artificial
  20-mer unique DNA sequence
tgtggtatgaagcgcgggag

SEQ ID NO: 8083 - DNA, 20 bp, Artificial
  20-mer unique DNA sequence
gcaggcttatttttcgcggc

SEQ ID NO: 8084 - DNA, 20 bp, Artificial
  20-mer unique DNA sequence
cgccctgcaacgctcactcc

SEQ ID NO: 8085 - DNA, 20 bp, Artificial
  20-mer unique DNA sequence
tggatgggcgtgaacaggga

SEQ ID NO: 8086 - DNA, 20 bp, Artificial
  20-mer unique DNA sequence
tgcggcaacaggaacttgga

SEQ ID NO: 8087 - DNA, 20 bp, Artificial
  20-mer unique DNA sequence
tcggttgggaatcagggtgg

SEQ ID NO: 8088 - DNA, 20 bp, Artificial
  20-mer unique DNA sequence
cccgaacccccgatagatgg

SEQ ID NO: 8089 - DNA, 20 bp, Artificial
  20-mer unique DNA sequence
caacaagccctgcccgtgat

SEQ ID NO: 8090 - DNA, 20 bp, Artificial
  20-mer unique DNA sequence
ccggcaatcgggttccacta

SEQ ID NO: 8091 - DNA, 20 bp, Artificial
  20-mer unique DNA sequence
gccgacagttcacgcgacta

SEQ ID NO: 8092 - DNA, 20 bp, Artificial
  20-mer unique DNA sequence
gctcacgaactcgccaaaaa

SEQ ID NO: 8093 - DNA, 20 bp, Artificial
  20-mer unique DNA sequence
gaagtgatggacggcaggca

SEQ ID NO: 8094 - DNA, 20 bp, Artificial
  20-mer unique DNA sequence
tctatcggaatcgccacgcc

SEQ ID NO: 8095 - DNA, 20 bp, Artificial
  20-mer unique DNA sequence
caaaagcgactgcccccgaa

SEQ ID NO: 8096 - DNA, 20 bp, Artificial
  20-mer unique DNA sequence
cgacaggaggccggaaaagc

SEQ ID NO: 8097 - DNA, 20 bp, Artificial
  20-mer unique DNA sequence
aagcaacttccggcctcgca

SEQ ID NO: 8098 - DNA, 20 bp, Artificial
  20-mer unique DNA sequence
ggtggaggccgtgaattgca

SEQ ID NO: 8099 - DNA, 20 bp, Artificial
  20-mer unique DNA sequence
agctttttgatccatgcggg

SEQ ID NO: 8100 - DNA, 20 bp, Artificial
  20-mer unique DNA sequence
cacctctatgcgatccggcc

SEQ ID NO: 8101 - DNA, 20 bp, Artificial
  20-mer unique DNA sequence
cgccgcgttttgttcagctc

SEQ ID NO: 8102 - DNA, 20 bp, Artificial
  20-mer unique DNA sequence
gcgaagaaaatggcagggcg

SEQ ID NO: 8103 - DNA, 20 bp, Artificial
  20-mer unique DNA sequence
cttcctgaccgctcccaacg

SEQ ID NO: 8104 - DNA, 20 bp, Artificial
  20-mer unique DNA sequence
gccccgtagctgcgaaagag

SEQ ID NO: 8105 - DNA, 20 bp, Artificial
  20-mer unique DNA sequence
gcgcgggtaggtgcgtgtga

SEQ ID NO: 8106 - DNA, 20 bp, Artificial
  20-mer unique DNA sequence
cccccgtttccctcgcacta

SEQ ID NO: 8107 - DNA, 20 bp, Artificial
  20-mer unique DNA sequence
agcggggtgaggtacgaaag

SEQ ID NO: 8108 - DNA, 20 bp, Artificial
  20-mer unique DNA sequence
gcggatgctacgaattggcg

SEQ ID NO: 8109 - DNA, 20 bp, Artificial
  20-mer unique DNA sequence
gcttggccggaggggtacac

SEQ ID NO: 8110 - DNA, 20 bp, Artificial
  20-mer unique DNA sequence
aacgcttccggccctagacg

SEQ ID NO: 8111 - DNA, 20 bp, Artificial
  20-mer unique DNA sequence
cgacttccgcatctccccac

SEQ ID NO: 8112 - DNA, 20 bp, Artificial
  20-mer unique DNA sequence
gactctgcgcgctccatcgg

SEQ ID NO: 8113 - DNA, 20 bp, Artificial
  20-mer unique DNA sequence
tgggatctacggcccttggg

SEQ ID NO: 8114 - DNA, 20 bp, Artificial
  20-mer unique DNA sequence
ctcccgcaaccgatcagctg

SEQ ID NO: 8115 - DNA, 20 bp, Artificial
  20-mer unique DNA sequence
ttgttccattacggcgtcct

SEQ ID NO: 8116 - DNA, 20 bp, Artificial
  20-mer unique DNA sequence
ttagggcagcaggcggaggg

SEQ ID NO: 8117 - DNA, 20 bp, Artificial
  20-mer unique DNA sequence
gttcgggttccttgccttgc

SEQ ID NO: 8118 - DNA, 20 bp, Artificial
  20-mer unique DNA sequence
aacacaccgcccagccatcg

SEQ ID NO: 8119 - DNA, 20 bp, Artificial
  20-mer unique DNA sequence
aggttggggtcgactgtggc

SEQ ID NO: 8120 - DNA, 20 bp, Artificial
  20-mer unique DNA sequence
ggtttcggccgctaggtgtc

SEQ ID NO: 8121 - DNA, 20 bp, Artificial
  20-mer unique DNA sequence
tcgacccgcatatcccccag

SEQ ID NO: 8122 - DNA, 20 bp, Artificial
  20-mer unique DNA sequence
ggccaaaacaagcaccgcaa

SEQ ID NO: 8123 - DNA, 20 bp, Artificial
  20-mer unique DNA sequence
gaaaggcaggcgtgggcgat

SEQ ID NO: 8124 - DNA, 20 bp, Artificial
  20-mer unique DNA sequence
ccaatctgtgctctccgcga

SEQ ID NO: 8125 - DNA, 20 bp, Artificial
  20-mer unique DNA sequence
cgtcggccaggtttgcaagg

SEQ ID NO: 8126 - DNA, 20 bp, Artificial
  20-mer unique DNA sequence
ggcggtaagattggcgaagc

SEQ ID NO: 8127 - DNA, 20 bp, Artificial
  20-mer unique DNA sequence
gtggggcaatcggcaaaaag

SEQ ID NO: 8128 - DNA, 20 bp, Artificial
  20-mer unique DNA sequence
acacccggcattcacccacg

SEQ ID NO: 8129 - DNA, 20 bp, Artificial
  20-mer unique DNA sequence
gtttgggttggagtgcgtct

SEQ ID NO: 8130 - DNA, 20 bp, Artificial
  20-mer unique DNA sequence
gcgccctcgtttggtacccc

SEQ ID NO: 8131 - DNA, 20 bp, Artificial
  20-mer unique DNA sequence
tgatcgtatttgcagggcgc

SEQ ID NO: 8132 - DNA, 20 bp, Artificial
  20-mer unique DNA sequence
ggcgagggaagggttgtgtg

SEQ ID NO: 8133 - DNA, 20 bp, Artificial
  20-mer unique DNA sequence
cacgaactaagccaacggcg

SEQ ID NO: 8134 - DNA, 20 bp, Artificial
  20-mer unique DNA sequence
ggcggggctgctctagtttg

SEQ ID NO: 8135 - DNA, 20 bp, Artificial
  20-mer unique DNA sequence
aaaactgcatgcgccgtcga

SEQ ID NO: 8136 - DNA, 20 bp, Artificial
  20-mer unique DNA sequence
tgggcggttcgggtgttgac

SEQ ID NO: 8137 - DNA, 20 bp, Artificial
  20-mer unique DNA sequence
ccgctttcccgccttgacta

SEQ ID NO: 8138 - DNA, 20 bp, Artificial
  20-mer unique DNA sequence
ggacaaatgcgggaagggaa

SEQ ID NO: 8139 - DNA, 20 bp, Artificial
  20-mer unique DNA sequence
gctcattcgcccccatttgt

SEQ ID NO: 8140 - DNA, 20 bp, Artificial
  20-mer unique DNA sequence
tatccccccttgagcccttt

SEQ ID NO: 8141 - DNA, 20 bp, Artificial
  20-mer unique DNA sequence
gtgggggaggggactgtgaa

SEQ ID NO: 8142 - DNA, 20 bp, Artificial
  20-mer unique DNA sequence
accgattaccttgcgcctgg

SEQ ID NO: 8143 - DNA, 20 bp, Artificial
  20-mer unique DNA sequence
tagcgcatcaacccacacgg

SEQ ID NO: 8144 - DNA, 20 bp, Artificial
  20-mer unique DNA sequence
cccgcacagatcgcacgaag

SEQ ID NO: 8145 - DNA, 20 bp, Artificial
  20-mer unique DNA sequence
cgcccctaagcacgcaaaca

SEQ ID NO: 8146 - DNA, 20 bp, Artificial
  20-mer unique DNA sequence
gaccgatccctcccagcctc

SEQ ID NO: 8147 - DNA, 20 bp, Artificial
  20-mer unique DNA sequence
ggacaccccggaaagagcag

SEQ ID NO: 8148 - DNA, 20 bp, Artificial
  20-mer unique DNA sequence
caaagtgcgcgctaatcccc

SEQ ID NO: 8149 - DNA, 20 bp, Artificial
  20-mer unique DNA sequence
gacatgcaaatacgccgccc

SEQ ID NO: 8150 - DNA, 20 bp, Artificial
  20-mer unique DNA sequence
gtggaggggcaggcaggaag

SEQ ID NO: 8151 - DNA, 20 bp, Artificial
  20-mer unique DNA sequence
aggggacgaaggcaccaggg

SEQ ID NO: 8152 - DNA, 20 bp, Artificial
  20-mer unique DNA sequence
aaacacccacgccaaagcct

SEQ ID NO: 8153 - DNA, 20 bp, Artificial
  20-mer unique DNA sequence
tgttgggtctggtgcggagg

SEQ ID NO: 8154 - DNA, 20 bp, Artificial
  20-mer unique DNA sequence
gcttgtcggcatgtacccgg

SEQ ID NO: 8155 - DNA, 20 bp, Artificial
  20-mer unique DNA sequence
tctaaccgtctgccccgccc

SEQ ID NO: 8156 - DNA, 20 bp, Artificial
  20-mer unique DNA sequence
acggagcacagcggggatca

SEQ ID NO: 8157 - DNA, 20 bp, Artificial
  20-mer unique DNA sequence
cctacccctgcgtgccgttc

SEQ ID NO: 8158 - DNA, 20 bp, Artificial
  20-mer unique DNA sequence
gcagcgagaggagggcaact

SEQ ID NO: 8159 - DNA, 20 bp, Artificial
  20-mer unique DNA sequence
caccgaagccagcacccgtt

SEQ ID NO: 8160 - DNA, 20 bp, Artificial
  20-mer unique DNA sequence
gtcgcggctggcatcttgtt

SEQ ID NO: 8161 - DNA, 20 bp, Artificial
  20-mer unique DNA sequence
tgctagcagcccctcccgac

SEQ ID NO: 8162 - DNA, 20 bp, Artificial
  20-mer unique DNA sequence
gcttcgcgatgcccaggtac

SEQ ID NO: 8163 - DNA, 20 bp, Artificial
  20-mer unique DNA sequence
gtggaacccagtggctgcaa

SEQ ID NO: 8164 - DNA, 20 bp, Artificial
  20-mer unique DNA sequence
gggcgcttgtctcggttgtg

SEQ ID NO: 8165 - DNA, 20 bp, Artificial
  20-mer unique DNA sequence
ggggtacgcctggtgcaatt

SEQ ID NO: 8166 - DNA, 20 bp, Artificial
  20-mer unique DNA sequence
gcctacgtcgctcccctgcc

SEQ ID NO: 8167 - DNA, 20 bp, Artificial
  20-mer unique DNA sequence
atggagagatggcgacggcg

SEQ ID NO: 8168 - DNA, 20 bp, Artificial
  20-mer unique DNA sequence
cagcaccgtgatccgacact

SEQ ID NO: 8169 - DNA, 20 bp, Artificial
  20-mer unique DNA sequence
ctacatgcgtcgcactggca

SEQ ID NO: 8170 - DNA, 20 bp, Artificial
  20-mer unique DNA sequence
tcacgtcggtcgaagcagtc

SEQ ID NO: 8171 - DNA, 20 bp, Artificial
  20-mer unique DNA sequence
acactgcagctagggcgcaa

SEQ ID NO: 8172 - DNA, 20 bp, Artificial
  20-mer unique DNA sequence
ccatccgggtccaaatcgaa

SEQ ID NO: 8173 - DNA, 20 bp, Artificial
  20-mer unique DNA sequence
gggtgcttgtgggcggattt

SEQ ID NO: 8174 - DNA, 20 bp, Artificial
  20-mer unique DNA sequence
ttgcctctctgcctcgcacc

SEQ ID NO: 8175 - DNA, 20 bp, Artificial
  20-mer unique DNA sequence
ctggaacagccccccttgga

SEQ ID NO: 8176 - DNA, 20 bp, Artificial
  20-mer unique DNA sequence
agcacgtcccatcagcaccg

SEQ ID NO: 8177 - DNA, 20 bp, Artificial
  20-mer unique DNA sequence
caaacccaagaaagcgccca

SEQ ID NO: 8178 - DNA, 20 bp, Artificial
  20-mer unique DNA sequence
taccaaagggcgacatgggc

SEQ ID NO: 8179 - DNA, 20 bp, Artificial
  20-mer unique DNA sequence
tgccattgccgataaagcgg

SEQ ID NO: 8180 - DNA, 20 bp, Artificial
  20-mer unique DNA sequence
cccgagggggtggtaggtgt

SEQ ID NO: 8181 - DNA, 20 bp, Artificial
  20-mer unique DNA sequence
ccttcggtaggagccctggc

SEQ ID NO: 8182 - DNA, 20 bp, Artificial
  20-mer unique DNA sequence
acgcaacacccaatcatccg

SEQ ID NO: 8183 - DNA, 20 bp, Artificial
  20-mer unique DNA sequence
tacttgctttgcgggcctcg

SEQ ID NO: 8184 - DNA, 20 bp, Artificial
  20-mer unique DNA sequence
atgttccattgagcgccccg

SEQ ID NO: 8185 - DNA, 20 bp, Artificial
  20-mer unique DNA sequence
gttttccccggctgacctgc

SEQ ID NO: 8186 - DNA, 20 bp, Artificial
  20-mer unique DNA sequence
gcgagtggctggtcctggaa

SEQ ID NO: 8187 - DNA, 20 bp, Artificial
  20-mer unique DNA sequence
gggcccacaaaaaaagcgca

SEQ ID NO: 8188 - DNA, 20 bp, Artificial
  20-mer unique DNA sequence
gtcatttcggggtcggcaag

SEQ ID NO: 8189 - DNA, 20 bp, Artificial
  20-mer unique DNA sequence
ggtcgggggaaagggaatgt

SEQ ID NO: 8190 - DNA, 20 bp, Artificial
  20-mer unique DNA sequence
gcgctagtggatgggcagag

SEQ ID NO: 8191 - DNA, 20 bp, Artificial
  20-mer unique DNA sequence
cggcgaacgaacgactggac

SEQ ID NO: 8192 - DNA, 20 bp, Artificial
  20-mer unique DNA sequence
tccacgttccccccgctacc

SEQ ID NO: 8193 - DNA, 20 bp, Artificial
  20-mer unique DNA sequence
ggcgcgcgtcaagtgttcag

SEQ ID NO: 8194 - DNA, 20 bp, Artificial
  20-mer unique DNA sequence
gacctccacacacccctgcg

SEQ ID NO: 8195 - DNA, 20 bp, Artificial
  20-mer unique DNA sequence
cgggggggtgagtagacgtg

SEQ ID NO: 8196 - DNA, 20 bp, Artificial
  20-mer unique DNA sequence
cagacactcgcggccaaaat

SEQ ID NO: 8197 - DNA, 20 bp, Artificial
  20-mer unique DNA sequence
tcgccggcttcgtcatcttt

SEQ ID NO: 8198 - DNA, 20 bp, Artificial
  20-mer unique DNA sequence
acagccatgcgtacgtgggt

SEQ ID NO: 8199 - DNA, 20 bp, Artificial
  20-mer unique DNA sequence
acgcggccgatctaagggta

SEQ ID NO: 8200 - DNA, 20 bp, Artificial
  20-mer unique DNA sequence
ccgtaacgcccatgcaacgc

SEQ ID NO: 8201 - DNA, 20 bp, Artificial
  20-mer unique DNA sequence
tcccagccccagctaccaga

SEQ ID NO: 8202 - DNA, 20 bp, Artificial
  20-mer unique DNA sequence
ccagagtgacccccgccaag

SEQ ID NO: 8203 - DNA, 20 bp, Artificial
  20-mer unique DNA sequence
agcaaatggtgtccgcgcag

SEQ ID NO: 8204 - DNA, 20 bp, Artificial
  20-mer unique DNA sequence
tgtggagaagcgtgatgcgg

SEQ ID NO: 8205 - DNA, 20 bp, Artificial
  20-mer unique DNA sequence
actgatgaaagcaccgcggc

SEQ ID NO: 8206 - DNA, 20 bp, Artificial
  20-mer unique DNA sequence
tctggatcaggcgcaggctt

SEQ ID NO: 8207 - DNA, 20 bp, Artificial
  20-mer unique DNA sequence
ttggcacaatgggggttccg

SEQ ID NO: 8208 - DNA, 20 bp, Artificial
  20-mer unique DNA sequence
atgatccaccaaaccggccg

SEQ ID NO: 8209 - DNA, 20 bp, Artificial
  20-mer unique DNA sequence
gcctgccacgattcgaccca

SEQ ID NO: 8210 - DNA, 20 bp, Artificial
  20-mer unique DNA sequence
gggagtcgatgccgctttgc

SEQ ID NO: 8211 - DNA, 20 bp, Artificial
  20-mer unique DNA sequence
tcataggaacggggctgcgt

SEQ ID NO: 8212 - DNA, 20 bp, Artificial
  20-mer unique DNA sequence
ccgctctcgcgttttcacag

SEQ ID NO: 8213 - DNA, 20 bp, Artificial
  20-mer unique DNA sequence
cggaccactccacacacccg

SEQ ID NO: 8214 - DNA, 20 bp, Artificial
  20-mer unique DNA sequence
tgaagggggggctacgctga

SEQ ID NO: 8215 - DNA, 20 bp, Artificial
  20-mer unique DNA sequence
tgatgatgggtcttgcggga

SEQ ID NO: 8216 - DNA, 20 bp, Artificial
  20-mer unique DNA sequence
tcggaagacacaccatcggg

SEQ ID NO: 8217 - DNA, 20 bp, Artificial
  20-mer unique DNA sequence
gtgtgtggtcggtgcgtcgg

SEQ ID NO: 8218 - DNA, 20 bp, Artificial
  20-mer unique DNA sequence
caaccggccacacatttccc

SEQ ID NO: 8219 - DNA, 20 bp, Artificial
  20-mer unique DNA sequence
ttgcccgcggaggtatcgta

SEQ ID NO: 8220 - DNA, 20 bp, Artificial
  20-mer unique DNA sequence
actcgaactgcatggggaca

SEQ ID NO: 8221 - DNA, 20 bp, Artificial
  20-mer unique DNA sequence
gtagacggttgggggaggcg

SEQ ID NO: 8222 - DNA, 20 bp, Artificial
  20-mer unique DNA sequence
cgggggttgtcattcggtcg

SEQ ID NO: 8223 - DNA, 20 bp, Artificial
  20-mer unique DNA sequence
cccccgacgcgtttatcctt

SEQ ID NO: 8224 - DNA, 20 bp, Artificial
  20-mer unique DNA sequence
cgatgggacggcggtagcta

SEQ ID NO: 8225 - DNA, 20 bp, Artificial
  20-mer unique DNA sequence
cattcgaagaggcaacgggc

SEQ ID NO: 8226 - DNA, 20 bp, Artificial
  20-mer unique DNA sequence
tgtgggcggagtgtgtgctc

SEQ ID NO: 8227 - DNA, 20 bp, Artificial
  20-mer unique DNA sequence
tggagtgtattgggggggga

SEQ ID NO: 8228 - DNA, 20 bp, Artificial
  20-mer unique DNA sequence
gccctcctacacctgccgtc

SEQ ID NO: 8229 - DNA, 20 bp, Artificial
  20-mer unique DNA sequence
agcacaccaaacacaggcgg

SEQ ID NO: 8230 - DNA, 20 bp, Artificial
  20-mer unique DNA sequence
aattcccgacctgcccaccc

SEQ ID NO: 8231 - DNA, 20 bp, Artificial
  20-mer unique DNA sequence
agaccggggcacttaggcag

SEQ ID NO: 8232 - DNA, 20 bp, Artificial
  20-mer unique DNA sequence
ccagttgccctcagccgtct

SEQ ID NO: 8233 - DNA, 20 bp, Artificial
  20-mer unique DNA sequence
agaaaagggagaggggcgga

SEQ ID NO: 8234 - DNA, 20 bp, Artificial
  20-mer unique DNA sequence
acggaccacaccccctcgtc

SEQ ID NO: 8235 - DNA, 20 bp, Artificial
  20-mer unique DNA sequence
ggcaaggacatcgggtggaa

SEQ ID NO: 8236 - DNA, 20 bp, Artificial
  20-mer unique DNA sequence
acatccgcgtactgctccca

SEQ ID NO: 8237 - DNA, 20 bp, Artificial
  20-mer unique DNA sequence
tcgctacgggtctgacttcg

SEQ ID NO: 8238 - DNA, 20 bp, Artificial
  20-mer unique DNA sequence
acacaggggttgggcgggac

SEQ ID NO: 8239 - DNA, 20 bp, Artificial
  20-mer unique DNA sequence
ggttgaatgcgtccggtcgt

SEQ ID NO: 8240 - DNA, 20 bp, Artificial
  20-mer unique DNA sequence
tccccaatcccgcatcacga

SEQ ID NO: 8241 - DNA, 20 bp, Artificial
  20-mer unique DNA sequence
aagccaccccgctgccaaat

SEQ ID NO: 8242 - DNA, 20 bp, Artificial
  20-mer unique DNA sequence
cgcgggattgcattgtgtga

SEQ ID NO: 8243 - DNA, 20 bp, Artificial
  20-mer unique DNA sequence
cgagggagtggagtgggggc

SEQ ID NO: 8244 - DNA, 20 bp, Artificial
  20-mer unique DNA sequence
gcgggtaacttggcggtcgt

SEQ ID NO: 8245 - DNA, 20 bp, Artificial
  20-mer unique DNA sequence
ccggtggcgagaacccttta

SEQ ID NO: 8246 - DNA, 20 bp, Artificial
  20-mer unique DNA sequence
ggcgttggggggggactaca

SEQ ID NO: 8247 - DNA, 20 bp, Artificial
  20-mer unique DNA sequence
ggcacgaccgcaaccaccct

SEQ ID NO: 8248 - DNA, 20 bp, Artificial
  20-mer unique DNA sequence
cctgcccctaaaacccgtgc

SEQ ID NO: 8249 - DNA, 20 bp, Artificial
  20-mer unique DNA sequence
tttccccccgtttcgttcaa

SEQ ID NO: 8250 - DNA, 20 bp, Artificial
  20-mer unique DNA sequence
tcgccgtgtctgagcgctat

SEQ ID NO: 8251 - DNA, 20 bp, Artificial
  20-mer unique DNA sequence
gcgaggcttatgtccggtga

SEQ ID NO: 8252 - DNA, 20 bp, Artificial
  20-mer unique DNA sequence
tcatgacctcgcctctcccg

SEQ ID NO: 8253 - DNA, 20 bp, Artificial
  20-mer unique DNA sequence
gggttgagggtacggttgcg

SEQ ID NO: 8254 - DNA, 20 bp, Artificial
  20-mer unique DNA sequence
ggcgagaacggcgaacacct

SEQ ID NO: 8255 - DNA, 20 bp, Artificial
  20-mer unique DNA sequence
cgcgcgagatacgaatgagg

SEQ ID NO: 8256 - DNA, 20 bp, Artificial
  20-mer unique DNA sequence
tgatgggctccacggaaacc

SEQ ID NO: 8257 - DNA, 20 bp, Artificial
  20-mer unique DNA sequence
gcaacccaccgtacgaaggc

SEQ ID NO: 8258 - DNA, 20 bp, Artificial
  20-mer unique DNA sequence
gcgatttgcatggacgcgta

SEQ ID NO: 8259 - DNA, 20 bp, Artificial
  20-mer unique DNA sequence
taggcaaaccgggcacacac

SEQ ID NO: 8260 - DNA, 20 bp, Artificial
  20-mer unique DNA sequence
gccaggggaggagcgaacaa

SEQ ID NO: 8261 - DNA, 20 bp, Artificial
  20-mer unique DNA sequence
agaggatccatagcgggcga

SEQ ID NO: 8262 - DNA, 20 bp, Artificial
  20-mer unique DNA sequence
cggcgccacactccctaatc

SEQ ID NO: 8263 - DNA, 20 bp, Artificial
  20-mer unique DNA sequence
ttgctgcgcggttaaagtgg

SEQ ID NO: 8264 - DNA, 20 bp, Artificial
  20-mer unique DNA sequence
actcccctccgcgttgaatg

SEQ ID NO: 8265 - DNA, 20 bp, Artificial
  20-mer unique DNA sequence
cacgggctggatgacggagg

SEQ ID NO: 8266 - DNA, 20 bp, Artificial
  20-mer unique DNA sequence
tagaccggatcccaagggcg

SEQ ID NO: 8267 - DNA, 20 bp, Artificial
  20-mer unique DNA sequence
tcagggcgtcagggtcacaa

SEQ ID NO: 8268 - DNA, 20 bp, Artificial
  20-mer unique DNA sequence
ggattaacccgggccctgac

SEQ ID NO: 8269 - DNA, 20 bp, Artificial
  20-mer unique DNA sequence
cggcccctggaacttttggt

SEQ ID NO: 8270 - DNA, 20 bp, Artificial
  20-mer unique DNA sequence
gcggcaatgaggggggagtt

SEQ ID NO: 8271 - DNA, 20 bp, Artificial
  20-mer unique DNA sequence
aaccggtgtcccccatgaag

SEQ ID NO: 8272 - DNA, 20 bp, Artificial
  20-mer unique DNA sequence
cctagaccctccaatcgcgg

SEQ ID NO: 8273 - DNA, 20 bp, Artificial
  20-mer unique DNA sequence
acggggctttcgtgcttgtt

SEQ ID NO: 8274 - DNA, 20 bp, Artificial
  20-mer unique DNA sequence
ctacccgccgccccttagtt

SEQ ID NO: 8275 - DNA, 20 bp, Artificial
  20-mer unique DNA sequence
aaggcgatagggggtgagca

SEQ ID NO: 8276 - DNA, 20 bp, Artificial
  20-mer unique DNA sequence
ccgcaatacgtcacagcagc

SEQ ID NO: 8277 - DNA, 20 bp, Artificial
  20-mer unique DNA sequence
cctttcgacttccatcccgc

SEQ ID NO: 8278 - DNA, 20 bp, Artificial
  20-mer unique DNA sequence
catcccgccctgacaccttg

SEQ ID NO: 8279 - DNA, 20 bp, Artificial
  20-mer unique DNA sequence
accgccctgccactgttagc

SEQ ID NO: 8280 - DNA, 20 bp, Artificial
  20-mer unique DNA sequence
tgttacagcgggccgtacaa

SEQ ID NO: 8281 - DNA, 20 bp, Artificial
  20-mer unique DNA sequence
cactcgttccgacacggact

SEQ ID NO: 8282 - DNA, 20 bp, Artificial
  20-mer unique DNA sequence
tacctgggaactgcggcctt

SEQ ID NO: 8283 - DNA, 20 bp, Artificial
  20-mer unique DNA sequence
gccgagcgcagagtacccac

SEQ ID NO: 8284 - DNA, 20 bp, Artificial
  20-mer unique DNA sequence
ggtgcgggatggtacggttg

SEQ ID NO: 8285 - DNA, 20 bp, Artificial
  20-mer unique DNA sequence
aactactgctgcgcccccgg

SEQ ID NO: 8286 - DNA, 20 bp, Artificial
  20-mer unique DNA sequence
cggttcgaggtgtgaggcgc

SEQ ID NO: 8287 - DNA, 20 bp, Artificial
  20-mer unique DNA sequence
aatgggggaactttggcgtg

SEQ ID NO: 8288 - DNA, 20 bp, Artificial
  20-mer unique DNA sequence
cagctccgtgacggcgatta

SEQ ID NO: 8289 - DNA, 20 bp, Artificial
  20-mer unique DNA sequence
atggttccccctgtttgccc

SEQ ID NO: 8290 - DNA, 20 bp, Artificial
  20-mer unique DNA sequence
aacggtcaggggtcggggtc

SEQ ID NO: 8291 - DNA, 20 bp, Artificial
  20-mer unique DNA sequence
ctcaaggatcgggggcgcta

SEQ ID NO: 8292 - DNA, 20 bp, Artificial
  20-mer unique DNA sequence
ccccctccgggtttttgagt

SEQ ID NO: 8293 - DNA, 20 bp, Artificial
  20-mer unique DNA sequence
ggcaaacggggcagagggta

SEQ ID NO: 8294 - DNA, 20 bp, Artificial
  20-mer unique DNA sequence
tttacggggtgcgctttcca

SEQ ID NO: 8295 - DNA, 20 bp, Artificial
  20-mer unique DNA sequence
ttcacaagcgagccgtcacc

SEQ ID NO: 8296 - DNA, 20 bp, Artificial
  20-mer unique DNA sequence
ttctctgtcgcccccaccgt

SEQ ID NO: 8297 - DNA, 20 bp, Artificial
  20-mer unique DNA sequence
tgtacgtcatcctccggccg

SEQ ID NO: 8298 - DNA, 20 bp, Artificial
  20-mer unique DNA sequence
accgcaagaggtggccaatc

SEQ ID NO: 8299 - DNA, 20 bp, Artificial
  20-mer unique DNA sequence
tctccacccgcggtagatca

SEQ ID NO: 8300 - DNA, 20 bp, Artificial
  20-mer unique DNA sequence
acgtcacccaaccagcctcc

SEQ ID NO: 8301 - DNA, 20 bp, Artificial
  20-mer unique DNA sequence
taccggccgaagaagcaagg

SEQ ID NO: 8302 - DNA, 20 bp, Artificial
  20-mer unique DNA sequence
gcgcactccagtgcatgaga

SEQ ID NO: 8303 - DNA, 20 bp, Artificial
  20-mer unique DNA sequence
gtcgactcggcatgtgccat

SEQ ID NO: 8304 - DNA, 20 bp, Artificial
  20-mer unique DNA sequence
cgcatttcaaccccctcgct

SEQ ID NO: 8305 - DNA, 20 bp, Artificial
  20-mer unique DNA sequence
cagcgccttcattccccgtg

SEQ ID NO: 8306 - DNA, 20 bp, Artificial
  20-mer unique DNA sequence
tggcgatatgcacgtagcgt

SEQ ID NO: 8307 - DNA, 20 bp, Artificial
  20-mer unique DNA sequence
gggctcggggttttagcgtt

SEQ ID NO: 8308 - DNA, 20 bp, Artificial
  20-mer unique DNA sequence
agagggcttgcggatggtcg

SEQ ID NO: 8309 - DNA, 20 bp, Artificial
  20-mer unique DNA sequence
aggggaatggttctgggcgt

SEQ ID NO: 8310 - DNA, 20 bp, Artificial
  20-mer unique DNA sequence
gggtaagcaggcaagcgggt

SEQ ID NO: 8311 - DNA, 20 bp, Artificial
  20-mer unique DNA sequence
tgcccgaacccccattttag

SEQ ID NO: 8312 - DNA, 20 bp, Artificial
  20-mer unique DNA sequence
aacctgggcttccgtagggt

SEQ ID NO: 8313 - DNA, 20 bp, Artificial
  20-mer unique DNA sequence
atgggcctggggtcggaaac

SEQ ID NO: 8314 - DNA, 20 bp, Artificial
  20-mer unique DNA sequence
tgatcacggagcccaacgcc

SEQ ID NO: 8315 - DNA, 20 bp, Artificial
  20-mer unique DNA sequence
ttagctgcgtgggcccttgt

SEQ ID NO: 8316 - DNA, 20 bp, Artificial
  20-mer unique DNA sequence
taaggggggtggctggaagc

SEQ ID NO: 8317 - DNA, 20 bp, Artificial
  20-mer unique DNA sequence
ttcggtcgctgggtcgtctt

SEQ ID NO: 8318 - DNA, 20 bp, Artificial
  20-mer unique DNA sequence
cgccgggcccttaggacaac

SEQ ID NO: 8319 - DNA, 20 bp, Artificial
  20-mer unique DNA sequence
ccctccccaaggcccatcag

SEQ ID NO: 8320 - DNA, 20 bp, Artificial
  20-mer unique DNA sequence
tcagcccctcatcacgcgtt

SEQ ID NO: 8321 - DNA, 20 bp, Artificial
  20-mer unique DNA sequence
ctacgcgccctttccaccaa

SEQ ID NO: 8322 - DNA, 20 bp, Artificial
  20-mer unique DNA sequence
ccccagccagtaaaagccag

SEQ ID NO: 8323 - DNA, 20 bp, Artificial
  20-mer unique DNA sequence
atgagggtgggggtccgttg

SEQ ID NO: 8324 - DNA, 20 bp, Artificial
  20-mer unique DNA sequence
actcggcaaggcaatgggaa

SEQ ID NO: 8325 - DNA, 20 bp, Artificial
  20-mer unique DNA sequence
aggtcccccacccgtaccaa

SEQ ID NO: 8326 - DNA, 20 bp, Artificial
  20-mer unique DNA sequence
cggctcctccaccaagctag

SEQ ID NO: 8327 - DNA, 20 bp, Artificial
  20-mer unique DNA sequence
tccgacacccccaccgtaag

SEQ ID NO: 8328 - DNA, 20 bp, Artificial
  20-mer unique DNA sequence
ctcttggggttggatggccg

SEQ ID NO: 8329 - DNA, 20 bp, Artificial
  20-mer unique DNA sequence
agacgcgggggatttttgtg

SEQ ID NO: 8330 - DNA, 20 bp, Artificial
  20-mer unique DNA sequence
cctatcggccccttcgttca

SEQ ID NO: 8331 - DNA, 20 bp, Artificial
  20-mer unique DNA sequence
caaagcaagtcccccgtccc

SEQ ID NO: 8332 - DNA, 20 bp, Artificial
  20-mer unique DNA sequence
gaaggtgggcgacaaacgga

SEQ ID NO: 8333 - DNA, 20 bp, Artificial
  20-mer unique DNA sequence
gtgcttcttcgtggtggcgg

SEQ ID NO: 8334 - DNA, 20 bp, Artificial
  20-mer unique DNA sequence
gggggaaggcgaaaagcaga

SEQ ID NO: 8335 - DNA, 20 bp, Artificial
  20-mer unique DNA sequence
ggcagaggtgacggcaagcg

SEQ ID NO: 8336 - DNA, 20 bp, Artificial
  20-mer unique DNA sequence
gccggccaccacacactcaa

SEQ ID NO: 8337 - DNA, 20 bp, Artificial
  20-mer unique DNA sequence
accgccagccctcacatttg

SEQ ID NO: 8338 - DNA, 20 bp, Artificial
  20-mer unique DNA sequence
tttccccatccctcgccctg

SEQ ID NO: 8339 - DNA, 20 bp, Artificial
  20-mer unique DNA sequence
aggaggcggcaatgtgaggc

SEQ ID NO: 8340 - DNA, 20 bp, Artificial
  20-mer unique DNA sequence
tgcgggagggacaggggtaa

SEQ ID NO: 8341 - DNA, 20 bp, Artificial
  20-mer unique DNA sequence
taggagtgtgcggggacggg

SEQ ID NO: 8342 - DNA, 20 bp, Artificial
  20-mer unique DNA sequence
aagcgggggttaggagggtg

SEQ ID NO: 8343 - DNA, 20 bp, Artificial
  20-mer unique DNA sequence
acgttctttgcggccgggtc

SEQ ID NO: 8344 - DNA, 20 bp, Artificial
  20-mer unique DNA sequence
tacgacgtagtcaccgcgtg

SEQ ID NO: 8345 - DNA, 20 bp, Artificial
  20-mer unique DNA sequence
ttcacgcccccctataccgc

SEQ ID NO: 8346 - DNA, 20 bp, Artificial
  20-mer unique DNA sequence
ccgtgcgatcgcctgagtaa

SEQ ID NO: 8347 - DNA, 20 bp, Artificial
  20-mer unique DNA sequence
agtaatgcacgctgcgcgag

SEQ ID NO: 8348 - DNA, 20 bp, Artificial
  20-mer unique DNA sequence
cccagtgccgattgacctct

SEQ ID NO: 8349 - DNA, 20 bp, Artificial
  20-mer unique DNA sequence
atcccgacctctaggcggta

SEQ ID NO: 8350 - DNA, 20 bp, Artificial
  20-mer unique DNA sequence
tcaggcgctgtgaggtccaa

SEQ ID NO: 8351 - DNA, 20 bp, Artificial
  20-mer unique DNA sequence
tagagagccgctgtcacgca

SEQ ID NO: 8352 - DNA, 20 bp, Artificial
  20-mer unique DNA sequence
ccctccacccttgtccaccg

SEQ ID NO: 8353 - DNA, 20 bp, Artificial
  20-mer unique DNA sequence
tggttgccgactttctcccg

SEQ ID NO: 8354 - DNA, 20 bp, Artificial
  20-mer unique DNA sequence
tgctgctctgtgacgctacg

SEQ ID NO: 8355 - DNA, 20 bp, Artificial
  20-mer unique DNA sequence
gtcatgacgagctcggtcca

SEQ ID NO: 8356 - DNA, 20 bp, Artificial
  20-mer unique DNA sequence
ctcacgtgcgcggcatttaa

SEQ ID NO: 8357 - DNA, 20 bp, Artificial
  20-mer unique DNA sequence
cttctgccctgctcgtcccg

SEQ ID NO: 8358 - DNA, 20 bp, Artificial
  20-mer unique DNA sequence
tgtggcgagcgctgttttga

SEQ ID NO: 8359 - DNA, 20 bp, Artificial
  20-mer unique DNA sequence
cggagctcggctttggtcat

SEQ ID NO: 8360 - DNA, 20 bp, Artificial
  20-mer unique DNA sequence
cgagggagagtttggcgcag

SEQ ID NO: 8361 - DNA, 20 bp, Artificial
  20-mer unique DNA sequence
tctgcgccaaaatctcccgg

SEQ ID NO: 8362 - DNA, 20 bp, Artificial
  20-mer unique DNA sequence
cgaatgcgccgaggtaagct

SEQ ID NO: 8363 - DNA, 20 bp, Artificial
  20-mer unique DNA sequence
gggcggcggttgtgttgttg

SEQ ID NO: 8364 - DNA, 20 bp, Artificial
  20-mer unique DNA sequence
tccaccttaatcccgcggcc

SEQ ID NO: 8365 - DNA, 20 bp, Artificial
  20-mer unique DNA sequence
tcaaatggcagggggcaagc

SEQ ID NO: 8366 - DNA, 20 bp, Artificial
  20-mer unique DNA sequence
gggttgggtttagtcgccgg

SEQ ID NO: 8367 - DNA, 20 bp, Artificial
  20-mer unique DNA sequence
acgcgagacttcagaggggc

SEQ ID NO: 8368 - DNA, 20 bp, Artificial
  20-mer unique DNA sequence
tggccggctgctttgattcc

SEQ ID NO: 8369 - DNA, 20 bp, Artificial
  20-mer unique DNA sequence
tccttgtggggcgcgagctt

SEQ ID NO: 8370 - DNA, 20 bp, Artificial
  20-mer unique DNA sequence
ttagcgtggcctggtgtcga

SEQ ID NO: 8371 - DNA, 20 bp, Artificial
  20-mer unique DNA sequence
ccaccaattgccagcgtccc

SEQ ID NO: 8372 - DNA, 20 bp, Artificial
  20-mer unique DNA sequence
tgcgcccactaggaaagccg

SEQ ID NO: 8373 - DNA, 20 bp, Artificial
  20-mer unique DNA sequence
gcgttgcagcggttaatgga

SEQ ID NO: 8374 - DNA, 20 bp, Artificial
  20-mer unique DNA sequence
gagtatggggggttccgcgg

SEQ ID NO: 8375 - DNA, 20 bp, Artificial
  20-mer unique DNA sequence
gcgcgcggagactggtgaac

SEQ ID NO: 8376 - DNA, 20 bp, Artificial
  20-mer unique DNA sequence
tgtgcgtttgagcgatgggt

SEQ ID NO: 8377 - DNA, 20 bp, Artificial
  20-mer unique DNA sequence
actcccgctcgcaacaccat

SEQ ID NO: 8378 - DNA, 20 bp, Artificial
  20-mer unique DNA sequence
actccctcggcctttctcaa

SEQ ID NO: 8379 - DNA, 20 bp, Artificial
  20-mer unique DNA sequence
gccattcagtccgttcgccc

SEQ ID NO: 8380 - DNA, 20 bp, Artificial
  20-mer unique DNA sequence
tgggggtcgccggatggtat

SEQ ID NO: 8381 - DNA, 20 bp, Artificial
  20-mer unique DNA sequence
atgcacctacccacccgcga

SEQ ID NO: 8382 - DNA, 20 bp, Artificial
  20-mer unique DNA sequence
ggagtaaggggccgcgaggt

SEQ ID NO: 8383 - DNA, 20 bp, Artificial
  20-mer unique DNA sequence
gcgcgcgttttgtatgctca

SEQ ID NO: 8384 - DNA, 20 bp, Artificial
  20-mer unique DNA sequence
ggaaaccacacacggccgct

SEQ ID NO: 8385 - DNA, 20 bp, Artificial
  20-mer unique DNA sequence
cgtccgcatcatctccccca

SEQ ID NO: 8386 - DNA, 20 bp, Artificial
  20-mer unique DNA sequence
acgctgcgtcatggtcaagt

SEQ ID NO: 8387 - DNA, 20 bp, Artificial
  20-mer unique DNA sequence
gattcacatggcacccaggc

SEQ ID NO: 8388 - DNA, 20 bp, Artificial
  20-mer unique DNA sequence
gcggatcgctgactcgttct

SEQ ID NO: 8389 - DNA, 20 bp, Artificial
  20-mer unique DNA sequence
tgactggccacactacgggt

SEQ ID NO: 8390 - DNA, 20 bp, Artificial
  20-mer unique DNA sequence
gtaccgctcgctaggctcat

SEQ ID NO: 8391 - DNA, 20 bp, Artificial
  20-mer unique DNA sequence
tccctgatgggtcccaaacg

SEQ ID NO: 8392 - DNA, 20 bp, Artificial
  20-mer unique DNA sequence
ccccccgtggctactcgaat

SEQ ID NO: 8393 - DNA, 20 bp, Artificial
  20-mer unique DNA sequence
gagtggattcgggggggacg

SEQ ID NO: 8394 - DNA, 20 bp, Artificial
  20-mer unique DNA sequence
ccgcgcctgccaatatctga

SEQ ID NO: 8395 - DNA, 20 bp, Artificial
  20-mer unique DNA sequence
ccctcacaaacgccacgatg

SEQ ID NO: 8396 - DNA, 20 bp, Artificial
  20-mer unique DNA sequence
gtattctcgcctgcaacgcg

SEQ ID NO: 8397 - DNA, 20 bp, Artificial
  20-mer unique DNA sequence
agtggagcgcgaagtgcatg

SEQ ID NO: 8398 - DNA, 20 bp, Artificial
  20-mer unique DNA sequence
agcgagatcgcacctgtagc

SEQ ID NO: 8399 - DNA, 20 bp, Artificial
  20-mer unique DNA sequence
aaccgttaggtccgaccgtg

SEQ ID NO: 8400 - DNA, 20 bp, Artificial
  20-mer unique DNA sequence
ctgggggcgctgtcaatggt

SEQ ID NO: 8401 - DNA, 20 bp, Artificial
  20-mer unique DNA sequence
ggaaggaccggcgaaacacg

SEQ ID NO: 8402 - DNA, 20 bp, Artificial
  20-mer unique DNA sequence
tctgtcgcgggctcactctg

SEQ ID NO: 8403 - DNA, 20 bp, Artificial
  20-mer unique DNA sequence
ggccttccggttcgtaccag

SEQ ID NO: 8404 - DNA, 20 bp, Artificial
  20-mer unique DNA sequence
cgactttccccgtttcgtcc

SEQ ID NO: 8405 - DNA, 20 bp, Artificial
  20-mer unique DNA sequence
tagggcgggtgggttcagtc

SEQ ID NO: 8406 - DNA, 20 bp, Artificial
  20-mer unique DNA sequence
ctcatctaggcgcgggcgaa

SEQ ID NO: 8407 - DNA, 20 bp, Artificial
  20-mer unique DNA sequence
tttaccatccgtgcgcccga

SEQ ID NO: 8408 - DNA, 20 bp, Artificial
  20-mer unique DNA sequence
tcgctatgtttgcccgctta

SEQ ID NO: 8409 - DNA, 20 bp, Artificial
  20-mer unique DNA sequence
attcgtgcctcgttcgcctt

SEQ ID NO: 8410 - DNA, 20 bp, Artificial
  20-mer unique DNA sequence
ttgtcaaggcggcaccaggc

SEQ ID NO: 8411 - DNA, 20 bp, Artificial
  20-mer unique DNA sequence
tggccgccagttagttaggc

SEQ ID NO: 8412 - DNA, 20 bp, Artificial
  20-mer unique DNA sequence
ggggttgttaagggggtggc

SEQ ID NO: 8413 - DNA, 20 bp, Artificial
  20-mer unique DNA sequence
gctttgtggggatggagggc

SEQ ID NO: 8414 - DNA, 20 bp, Artificial
  20-mer unique DNA sequence
tcctgccacttaagccccca

SEQ ID NO: 8415 - DNA, 20 bp, Artificial
  20-mer unique DNA sequence
ttaaaagatgggatggccgc

SEQ ID NO: 8416 - DNA, 20 bp, Artificial
  20-mer unique DNA sequence
ccccccacaagttgccgtca

SEQ ID NO: 8417 - DNA, 20 bp, Artificial
  20-mer unique DNA sequence
agagaacgtttgggcgccgg

SEQ ID NO: 8418 - DNA, 20 bp, Artificial
  20-mer unique DNA sequence
ttcccgccccgactacctga

SEQ ID NO: 8419 - DNA, 20 bp, Artificial
  20-mer unique DNA sequence
cgcggatgagacgagagcaa

SEQ ID NO: 8420 - DNA, 20 bp, Artificial
  20-mer unique DNA sequence
aggagcacccgcagtggaag

SEQ ID NO: 8421 - DNA, 20 bp, Artificial
  20-mer unique DNA sequence
tcgcggtgtaatggaggcag

SEQ ID NO: 8422 - DNA, 20 bp, Artificial
  20-mer unique DNA sequence
acgtcggttcgaccgtccat

SEQ ID NO: 8423 - DNA, 20 bp, Artificial
  20-mer unique DNA sequence
tggtcggaccgtgtgacatc

SEQ ID NO: 8424 - DNA, 20 bp, Artificial
  20-mer unique DNA sequence
gccctctagttaggcacgct

SEQ ID NO: 8425 - DNA, 20 bp, Artificial
  20-mer unique DNA sequence
tgagcgcgtcctgggggata

SEQ ID NO: 8426 - DNA, 20 bp, Artificial
  20-mer unique DNA sequence
caatcaatcactggccccga

SEQ ID NO: 8427 - DNA, 20 bp, Artificial
  20-mer unique DNA sequence
cgccgtggtggatcagcttg

SEQ ID NO: 8428 - DNA, 20 bp, Artificial
  20-mer unique DNA sequence
acaagccgggggaaacctag

SEQ ID NO: 8429 - DNA, 20 bp, Artificial
  20-mer unique DNA sequence
acgtaggcgccgagggatta

SEQ ID NO: 8430 - DNA, 20 bp, Artificial
  20-mer unique DNA sequence
gatgctgggctagacggtca

SEQ ID NO: 8431 - DNA, 20 bp, Artificial
  20-mer unique DNA sequence
cagggccactcacgtcagaa

SEQ ID NO: 8432 - DNA, 20 bp, Artificial
  20-mer unique DNA sequence
tctgcaacgtggccctcctg

SEQ ID NO: 8433 - DNA, 20 bp, Artificial
  20-mer unique DNA sequence
cgaacccttcaagccaccca

SEQ ID NO: 8434 - DNA, 20 bp, Artificial
  20-mer unique DNA sequence
gcaacagggaagccacagcg

SEQ ID NO: 8435 - DNA, 20 bp, Artificial
  20-mer unique DNA sequence
gcggcgactgtgttcttgga

SEQ ID NO: 8436 - DNA, 20 bp, Artificial
  20-mer unique DNA sequence
gcctcgaccaacgcataccc

SEQ ID NO: 8437 - DNA, 20 bp, Artificial
  20-mer unique DNA sequence
accctgccgcttccgatctt

SEQ ID NO: 8438 - DNA, 20 bp, Artificial
  20-mer unique DNA sequence
cgacgggcaatagcgagacg

SEQ ID NO: 8439 - DNA, 20 bp, Artificial
  20-mer unique DNA sequence
ctctgcagggacagctccgg

SEQ ID NO: 8440 - DNA, 20 bp, Artificial
  20-mer unique DNA sequence
cgcgcgtggtgctaaatgct

SEQ ID NO: 8441 - DNA, 20 bp, Artificial
  20-mer unique DNA sequence
ggcgcgggctgtgaatgaac

SEQ ID NO: 8442 - DNA, 20 bp, Artificial
  20-mer unique DNA sequence
cgcccgatcctgacctgttt

SEQ ID NO: 8443 - DNA, 20 bp, Artificial
  20-mer unique DNA sequence
tggaggttgtcggaccggga

SEQ ID NO: 8444 - DNA, 20 bp, Artificial
  20-mer unique DNA sequence
tcgggcctaggaatgggttg

SEQ ID NO: 8445 - DNA, 20 bp, Artificial
  20-mer unique DNA sequence
caccgcgcgcacaaatctcg

SEQ ID NO: 8446 - DNA, 20 bp, Artificial
  20-mer unique DNA sequence
tatgcccgcccaatttcccc

SEQ ID NO: 8447 - DNA, 20 bp, Artificial
  20-mer unique DNA sequence
ccggccggatgacttactgc

SEQ ID NO: 8448 - DNA, 20 bp, Artificial
  20-mer unique DNA sequence
cgtttgtcaccggcgatctg

SEQ ID NO: 8449 - DNA, 20 bp, Artificial
  20-mer unique DNA sequence
cgcggggggggataagcttc

SEQ ID NO: 8450 - DNA, 20 bp, Artificial
  20-mer unique DNA sequence
cacgtcatggggttggggaa

SEQ ID NO: 8451 - DNA, 20 bp, Artificial
  20-mer unique DNA sequence
ggcgggcttgttagggctgg

SEQ ID NO: 8452 - DNA, 20 bp, Artificial
  20-mer unique DNA sequence
ttcagacgagcaccggggag

SEQ ID NO: 8453 - DNA, 20 bp, Artificial
  20-mer unique DNA sequence
tccctgcccccggtaccatt

SEQ ID NO: 8454 - DNA, 20 bp, Artificial
  20-mer unique DNA sequence
ctcggggtctgggctttgct

SEQ ID NO: 8455 - DNA, 20 bp, Artificial
  20-mer unique DNA sequence
cctcagtcccccgcaaacct

SEQ ID NO: 8456 - DNA, 20 bp, Artificial
  20-mer unique DNA sequence
cggcaagaatcgggcgaagt

SEQ ID NO: 8457 - DNA, 20 bp, Artificial
  20-mer unique DNA sequence
gcgcataacgtgtcctccca

SEQ ID NO: 8458 - DNA, 20 bp, Artificial
  20-mer unique DNA sequence
ggggcgtcgtggttgtctgt

SEQ ID NO: 8459 - DNA, 20 bp, Artificial
  20-mer unique DNA sequence
gcgggcaggtgggactcaag

SEQ ID NO: 8460 - DNA, 20 bp, Artificial
  20-mer unique DNA sequence
cgatcttcgcgctaaccgct

SEQ ID NO: 8461 - DNA, 20 bp, Artificial
  20-mer unique DNA sequence
ccgtgacaaatccgcttccc

SEQ ID NO: 8462 - DNA, 20 bp, Artificial
  20-mer unique DNA sequence
tccatagccaacacggtcgc

SEQ ID NO: 8463 - DNA, 20 bp, Artificial
  20-mer unique DNA sequence
aaagcccccctctcgatgcc

SEQ ID NO: 8464 - DNA, 20 bp, Artificial
  20-mer unique DNA sequence
atgggcccgtgcgtgtctcg

SEQ ID NO: 8465 - DNA, 20 bp, Artificial
  20-mer unique DNA sequence
cacgctatcgccgaccctct

SEQ ID NO: 8466 - DNA, 20 bp, Artificial
  20-mer unique DNA sequence
tgtggctttgggggactgaa

SEQ ID NO: 8467 - DNA, 20 bp, Artificial
  20-mer unique DNA sequence
atgaagcaacgcccggtagg

SEQ ID NO: 8468 - DNA, 20 bp, Artificial
  20-mer unique DNA sequence
cgtttgtttgctcagcccgg

SEQ ID NO: 8469 - DNA, 20 bp, Artificial
  20-mer unique DNA sequence
tgacccatccgccttctccc

SEQ ID NO: 8470 - DNA, 20 bp, Artificial
  20-mer unique DNA sequence
gatcggaggccacgtcgatt

SEQ ID NO: 8471 - DNA, 20 bp, Artificial
  20-mer unique DNA sequence
ttcggcctagccgtcatgtg

SEQ ID NO: 8472 - DNA, 20 bp, Artificial
  20-mer unique DNA sequence
gtgccctgcccgctttccta

SEQ ID NO: 8473 - DNA, 20 bp, Artificial
  20-mer unique DNA sequence
cggcgggttgaagttggtga

SEQ ID NO: 8474 - DNA, 20 bp, Artificial
  20-mer unique DNA sequence
ctgtggcttggttggcggga

SEQ ID NO: 8475 - DNA, 20 bp, Artificial
  20-mer unique DNA sequence
tccccgttgcctccactccc

SEQ ID NO: 8476 - DNA, 20 bp, Artificial
  20-mer unique DNA sequence
atcgacccagtacgcgcaag

SEQ ID NO: 8477 - DNA, 20 bp, Artificial
  20-mer unique DNA sequence
gcgcaggcagtgtaaccgat

SEQ ID NO: 8478 - DNA, 20 bp, Artificial
  20-mer unique DNA sequence
ccgctccaacccgatacgaa

SEQ ID NO: 8479 - DNA, 20 bp, Artificial
  20-mer unique DNA sequence
tccgcgactaaacctgccaa

SEQ ID NO: 8480 - DNA, 20 bp, Artificial
  20-mer unique DNA sequence
gtaaggccggccaagggggt

SEQ ID NO: 8481 - DNA, 20 bp, Artificial
  20-mer unique DNA sequence
cgccatcagacagcctcccc

SEQ ID NO: 8482 - DNA, 20 bp, Artificial
  20-mer unique DNA sequence
gccacacatttcacccgcca

SEQ ID NO: 8483 - DNA, 20 bp, Artificial
  20-mer unique DNA sequence
ttcgttgagtgggattgccg

SEQ ID NO: 8484 - DNA, 20 bp, Artificial
  20-mer unique DNA sequence
attatgcgtagcgtcccggg

SEQ ID NO: 8485 - DNA, 20 bp, Artificial
  20-mer unique DNA sequence
tgcggccgactggattcact

SEQ ID NO: 8486 - DNA, 20 bp, Artificial
  20-mer unique DNA sequence
tacgccgtcccccttcctgg

SEQ ID NO: 8487 - DNA, 20 bp, Artificial
  20-mer unique DNA sequence
aaatgctggccgaaatgcgt

SEQ ID NO: 8488 - DNA, 20 bp, Artificial
  20-mer unique DNA sequence
ccgatcaagaacccgcagga

SEQ ID NO: 8489 - DNA, 20 bp, Artificial
  20-mer unique DNA sequence
cttcacccgtcgtcagccga

SEQ ID NO: 8490 - DNA, 20 bp, Artificial
  20-mer unique DNA sequence
ggcaccaacccctccaactg

SEQ ID NO: 8491 - DNA, 20 bp, Artificial
  20-mer unique DNA sequence
actggaggtgctgggctggt

SEQ ID NO: 8492 - DNA, 20 bp, Artificial
  20-mer unique DNA sequence
tcacccgtccccttacccac

SEQ ID NO: 8493 - DNA, 20 bp, Artificial
  20-mer unique DNA sequence
acgcccgcttctgaccatgt

SEQ ID NO: 8494 - DNA, 20 bp, Artificial
  20-mer unique DNA sequence
cgagagcgcagaagcaccac

SEQ ID NO: 8495 - DNA, 20 bp, Artificial
  20-mer unique DNA sequence
cagaccgcaaccatcgcaag

SEQ ID NO: 8496 - DNA, 20 bp, Artificial
  20-mer unique DNA sequence
atcgtcgtcgcctcctgggt

SEQ ID NO: 8497 - DNA, 20 bp, Artificial
  20-mer unique DNA sequence
caaaggctgacggatgggca

SEQ ID NO: 8498 - DNA, 20 bp, Artificial
  20-mer unique DNA sequence
gactctaacgcggaccgtct

SEQ ID NO: 8499 - DNA, 20 bp, Artificial
  20-mer unique DNA sequence
caactgttccgcccaggagt

SEQ ID NO: 8500 - DNA, 20 bp, Artificial
  20-mer unique DNA sequence
cccacgccaccgctaacaaa

SEQ ID NO: 8501 - DNA, 20 bp, Artificial
  20-mer unique DNA sequence
acacttggattcggggcgag

SEQ ID NO: 8502 - DNA, 20 bp, Artificial
  20-mer unique DNA sequence
aggcagggaatcgggtctga

SEQ ID NO: 8503 - DNA, 20 bp, Artificial
  20-mer unique DNA sequence
aggcgcgggcgattttagaa

SEQ ID NO: 8504 - DNA, 20 bp, Artificial
  20-mer unique DNA sequence
cctttcccagatgccgtcgt

SEQ ID NO: 8505 - DNA, 20 bp, Artificial
  20-mer unique DNA sequence
ccgaccgctccgtatgcaag

SEQ ID NO: 8506 - DNA, 20 bp, Artificial
  20-mer unique DNA sequence
ggtgcgcctgactccgtgct

SEQ ID NO: 8507 - DNA, 20 bp, Artificial
  20-mer unique DNA sequence
acacaggaatagcccgcgcg

SEQ ID NO: 8508 - DNA, 20 bp, Artificial
  20-mer unique DNA sequence
ccgtaagggggaaagcgtcg

SEQ ID NO: 8509 - DNA, 20 bp, Artificial
  20-mer unique DNA sequence
aggcgccggtgtattggagt

SEQ ID NO: 8510 - DNA, 20 bp, Artificial
  20-mer unique DNA sequence
acggggctgttatggtcggc

SEQ ID NO: 8511 - DNA, 20 bp, Artificial
  20-mer unique DNA sequence
ttccagctgccccggtttca

SEQ ID NO: 8512 - DNA, 20 bp, Artificial
  20-mer unique DNA sequence
acctccccacgcacaacccc

SEQ ID NO: 8513 - DNA, 20 bp, Artificial
  20-mer unique DNA sequence
agccttccccgcggttcata

SEQ ID NO: 8514 - DNA, 20 bp, Artificial
  20-mer unique DNA sequence
cggagatggtgtcgggtcaa

SEQ ID NO: 8515 - DNA, 20 bp, Artificial
  20-mer unique DNA sequence
agcgggtggatgatggtgtc

SEQ ID NO: 8516 - DNA, 20 bp, Artificial
  20-mer unique DNA sequence
ggctgggcttgcgagatggt

SEQ ID NO: 8517 - DNA, 20 bp, Artificial
  20-mer unique DNA sequence
gcactcttcccgccgctatg

SEQ ID NO: 8518 - DNA, 20 bp, Artificial
  20-mer unique DNA sequence
cggatcactcgcctcatggg

SEQ ID NO: 8519 - DNA, 20 bp, Artificial
  20-mer unique DNA sequence
acgcgcgactgcaccagaga

SEQ ID NO: 8520 - DNA, 20 bp, Artificial
  20-mer unique DNA sequence
cctgaccgtgccagctatgc

SEQ ID NO: 8521 - DNA, 20 bp, Artificial
  20-mer unique DNA sequence
ccactacatcgcaacccgga

SEQ ID NO: 8522 - DNA, 20 bp, Artificial
  20-mer unique DNA sequence
gggcggggtacaagctgaac

SEQ ID NO: 8523 - DNA, 20 bp, Artificial
  20-mer unique DNA sequence
taaaagcgttgggaaccggg

SEQ ID NO: 8524 - DNA, 20 bp, Artificial
  20-mer unique DNA sequence
gagaggaaaggaaccgcgcg

SEQ ID NO: 8525 - DNA, 20 bp, Artificial
  20-mer unique DNA sequence
gcttcaaacatcgggggctc

SEQ ID NO: 8526 - DNA, 20 bp, Artificial
  20-mer unique DNA sequence
atgaagggggcaacaatcgc

SEQ ID NO: 8527 - DNA, 20 bp, Artificial
  20-mer unique DNA sequence
accctccgttcccccttcgc

SEQ ID NO: 8528 - DNA, 20 bp, Artificial
  20-mer unique DNA sequence
catccggttggctttcgtca

SEQ ID NO: 8529 - DNA, 20 bp, Artificial
  20-mer unique DNA sequence
ggttgggacgcggaataggc

SEQ ID NO: 8530 - DNA, 20 bp, Artificial
  20-mer unique DNA sequence
atgatggacggcttggggca

SEQ ID NO: 8531 - DNA, 20 bp, Artificial
  20-mer unique DNA sequence
taccagccgccagaagcccc

SEQ ID NO: 8532 - DNA, 20 bp, Artificial
  20-mer unique DNA sequence
gctatggccgtcgaaaaccg

SEQ ID NO: 8533 - DNA, 20 bp, Artificial
  20-mer unique DNA sequence
tgcccgtccattcacccaag

SEQ ID NO: 8534 - DNA, 20 bp, Artificial
  20-mer unique DNA sequence
gcaggcgcttttcggagagg

SEQ ID NO: 8535 - DNA, 20 bp, Artificial
  20-mer unique DNA sequence
ggagcatgggggctgaagtc

SEQ ID NO: 8536 - DNA, 20 bp, Artificial
  20-mer unique DNA sequence
tggctgctaggcttccgtcg

SEQ ID NO: 8537 - DNA, 20 bp, Artificial
  20-mer unique DNA sequence
cggttgctgatctccgctca

SEQ ID NO: 8538 - DNA, 20 bp, Artificial
  20-mer unique DNA sequence
ggcgtcttaccgtaggcgaa

SEQ ID NO: 8539 - DNA, 20 bp, Artificial
  20-mer unique DNA sequence
tatctaggaccgggcagcca

SEQ ID NO: 8540 - DNA, 20 bp, Artificial
  20-mer unique DNA sequence
tcgctgtcggaggtgcaaca

SEQ ID NO: 8541 - DNA, 20 bp, Artificial
  20-mer unique DNA sequence
aggccggggactttactgca

SEQ ID NO: 8542 - DNA, 20 bp, Artificial
  20-mer unique DNA sequence
tggtgtgacggttggatcgg

SEQ ID NO: 8543 - DNA, 20 bp, Artificial
  20-mer unique DNA sequence
tcccacccagtacgcatgct

SEQ ID NO: 8544 - DNA, 20 bp, Artificial
  20-mer unique DNA sequence
ctgtttgggctgggctgtgg

SEQ ID NO: 8545 - DNA, 20 bp, Artificial
  20-mer unique DNA sequence
ttcggcccagtcatgctttg

SEQ ID NO: 8546 - DNA, 20 bp, Artificial
  20-mer unique DNA sequence
tacggactgcaagggacagc

SEQ ID NO: 8547 - DNA, 20 bp, Artificial
  20-mer unique DNA sequence
tggaggtctaaggcctggca

SEQ ID NO: 8548 - DNA, 20 bp, Artificial
  20-mer unique DNA sequence
ggccggtagatggtcgcgat

SEQ ID NO: 8549 - DNA, 20 bp, Artificial
  20-mer unique DNA sequence
ggggtaaggacgcggttgag

SEQ ID NO: 8550 - DNA, 20 bp, Artificial
  20-mer unique DNA sequence
agaggccgggatcagttgca

SEQ ID NO: 8551 - DNA, 20 bp, Artificial
  20-mer unique DNA sequence
ggtgttgtggcggtgcgtac

SEQ ID NO: 8552 - DNA, 20 bp, Artificial
  20-mer unique DNA sequence
tgccctacgcttctccctcg

SEQ ID NO: 8553 - DNA, 20 bp, Artificial
  20-mer unique DNA sequence
cacggggagcgaggacagga

SEQ ID NO: 8554 - DNA, 20 bp, Artificial
  20-mer unique DNA sequence
agtggggagagagggcgagt

SEQ ID NO: 8555 - DNA, 20 bp, Artificial
  20-mer unique DNA sequence
tgtgtgatttccgtgcgccg

SEQ ID NO: 8556 - DNA, 20 bp, Artificial
  20-mer unique DNA sequence
attgcctgccgttctccgag

SEQ ID NO: 8557 - DNA, 20 bp, Artificial
  20-mer unique DNA sequence
cttttcggccggtgtatggg

SEQ ID NO: 8558 - DNA, 20 bp, Artificial
  20-mer unique DNA sequence
agcgaccagctaggacacca

SEQ ID NO: 8559 - DNA, 20 bp, Artificial
  20-mer unique DNA sequence
aagagccctgagaggccgta

SEQ ID NO: 8560 - DNA, 20 bp, Artificial
  20-mer unique DNA sequence
ggcgggacgatgagggaaag

SEQ ID NO: 8561 - DNA, 20 bp, Artificial
  20-mer unique DNA sequence
catttatacccgagcgcccg

SEQ ID NO: 8562 - DNA, 20 bp, Artificial
  20-mer unique DNA sequence
tgctcctcaaagttccccgc

SEQ ID NO: 8563 - DNA, 20 bp, Artificial
  20-mer unique DNA sequence
gggtgggattagctcggcgg

SEQ ID NO: 8564 - DNA, 20 bp, Artificial
  20-mer unique DNA sequence
ctacgattggcaggcgggtc

SEQ ID NO: 8565 - DNA, 20 bp, Artificial
  20-mer unique DNA sequence
actgaagcgctggcaaacgg

SEQ ID NO: 8566 - DNA, 20 bp, Artificial
  20-mer unique DNA sequence
cctcgtgccctcattctgcg

SEQ ID NO: 8567 - DNA, 20 bp, Artificial
  20-mer unique DNA sequence
tcgccatcacgcctttttca

SEQ ID NO: 8568 - DNA, 20 bp, Artificial
  20-mer unique DNA sequence
accaggaatgacaggcgccg

SEQ ID NO: 8569 - DNA, 20 bp, Artificial
  20-mer unique DNA sequence
taagcggccatcaaccccac

SEQ ID NO: 8570 - DNA, 20 bp, Artificial
  20-mer unique DNA sequence
ggcgcgcagcaagtaaaccc

SEQ ID NO: 8571 - DNA, 20 bp, Artificial
  20-mer unique DNA sequence
ggcgcgcgattgtatgatgt

SEQ ID NO: 8572 - DNA, 20 bp, Artificial
  20-mer unique DNA sequence
tcaacaccccaaaacacggc

SEQ ID NO: 8573 - DNA, 20 bp, Artificial
  20-mer unique DNA sequence
agggaggcacaagacaggcg

SEQ ID NO: 8574 - DNA, 20 bp, Artificial
  20-mer unique DNA sequence
agtcccgccaaattcacgtg

SEQ ID NO: 8575 - DNA, 20 bp, Artificial
  20-mer unique DNA sequence
aactaccccgacacgcagca

SEQ ID NO: 8576 - DNA, 20 bp, Artificial
  20-mer unique DNA sequence
ccttgcgccctcggttgttc

SEQ ID NO: 8577 - DNA, 20 bp, Artificial
  20-mer unique DNA sequence
gtcattgtccccctccgcac

SEQ ID NO: 8578 - DNA, 20 bp, Artificial
  20-mer unique DNA sequence
gaaccacatgcgtggcacat

SEQ ID NO: 8579 - DNA, 20 bp, Artificial
  20-mer unique DNA sequence
tttctgccgactcgcagctt

SEQ ID NO: 8580 - DNA, 20 bp, Artificial
  20-mer unique DNA sequence
ggcgatggagtttggcaggc

SEQ ID NO: 8581 - DNA, 20 bp, Artificial
  20-mer unique DNA sequence
ctattgcggctgactgcgga

SEQ ID NO: 8582 - DNA, 20 bp, Artificial
  20-mer unique DNA sequence
cacgcgatacccgaaggcaa

SEQ ID NO: 8583 - DNA, 20 bp, Artificial
  20-mer unique DNA sequence
accggggagtcattgcaggc

SEQ ID NO: 8584 - DNA, 20 bp, Artificial
  20-mer unique DNA sequence
gtgacgacgggtttccgggg

SEQ ID NO: 8585 - DNA, 20 bp, Artificial
  20-mer unique DNA sequence
aatcaacgcgggcacaggag

SEQ ID NO: 8586 - DNA, 20 bp, Artificial
  20-mer unique DNA sequence
agcacctcggagtctaacgc

SEQ ID NO: 8587 - DNA, 20 bp, Artificial
  20-mer unique DNA sequence
tcgtggcacagacactcggt

SEQ ID NO: 8588 - DNA, 20 bp, Artificial
  20-mer unique DNA sequence
tcagggcgcgggtcatattt

SEQ ID NO: 8589 - DNA, 20 bp, Artificial
  20-mer unique DNA sequence
agaaccacgcgcctccaatg

SEQ ID NO: 8590 - DNA, 20 bp, Artificial
  20-mer unique DNA sequence
acctgcggcgcgactacaca

SEQ ID NO: 8591 - DNA, 20 bp, Artificial
  20-mer unique DNA sequence
cgtccaatcacggccacaga

SEQ ID NO: 8592 - DNA, 20 bp, Artificial
  20-mer unique DNA sequence
acccaaaaggacgcccacgg

SEQ ID NO: 8593 - DNA, 20 bp, Artificial
  20-mer unique DNA sequence
cgggccagaaaccaccagac

SEQ ID NO: 8594 - DNA, 20 bp, Artificial
  20-mer unique DNA sequence
tggctcactaatcccggcgg

SEQ ID NO: 8595 - DNA, 20 bp, Artificial
  20-mer unique DNA sequence
tggtggccggcgaaagactt

SEQ ID NO: 8596 - DNA, 20 bp, Artificial
  20-mer unique DNA sequence
gaagagggacgcacaaccgg

SEQ ID NO: 8597 - DNA, 20 bp, Artificial
  20-mer unique DNA sequence
agatgcgtggggaggtgtgg

SEQ ID NO: 8598 - DNA, 20 bp, Artificial
  20-mer unique DNA sequence
aaaagcgggccaggaattga

SEQ ID NO: 8599 - DNA, 20 bp, Artificial
  20-mer unique DNA sequence
aagcgggattcgggttttga

SEQ ID NO: 8600 - DNA, 20 bp, Artificial
  20-mer unique DNA sequence
tcacacggggagaactgggc

SEQ ID NO: 8601 - DNA, 20 bp, Artificial
  20-mer unique DNA sequence
ccatgtctgttgtgggggcg

SEQ ID NO: 8602 - DNA, 20 bp, Artificial
  20-mer unique DNA sequence
tactgccttgcctcaccccg

SEQ ID NO: 8603 - DNA, 20 bp, Artificial
  20-mer unique DNA sequence
tcatcgcgaattcacccccc

SEQ ID NO: 8604 - DNA, 20 bp, Artificial
  20-mer unique DNA sequence
gggccgggggaagagagaac

SEQ ID NO: 8605 - DNA, 20 bp, Artificial
  20-mer unique DNA sequence
ctggccccggtgtgaatgtc

SEQ ID NO: 8606 - DNA, 20 bp, Artificial
  20-mer unique DNA sequence
cggtggggtggatgtcgatg

SEQ ID NO: 8607 - DNA, 20 bp, Artificial
  20-mer unique DNA sequence
gcagacaatcagggacggcg

SEQ ID NO: 8608 - DNA, 20 bp, Artificial
  20-mer unique DNA sequence
tcgttcccaccgtatcccgc

SEQ ID NO: 8609 - DNA, 20 bp, Artificial
  20-mer unique DNA sequence
ggagttggcggagtaggggg

SEQ ID NO: 8610 - DNA, 20 bp, Artificial
  20-mer unique DNA sequence
acgaccctgccaaccgattt

SEQ ID NO: 8611 - DNA, 20 bp, Artificial
  20-mer unique DNA sequence
gggcaatatcaaacgcgggt

SEQ ID NO: 8612 - DNA, 20 bp, Artificial
  20-mer unique DNA sequence
ccacgtacacagccgccctt

SEQ ID NO: 8613 - DNA, 20 bp, Artificial
  20-mer unique DNA sequence
cgggtgggcagctaacaggt

SEQ ID NO: 8614 - DNA, 20 bp, Artificial
  20-mer unique DNA sequence
ggaaagtgtcgtgctcgcgg

SEQ ID NO: 8615 - DNA, 20 bp, Artificial
  20-mer unique DNA sequence
cgaatggaacctgaacggcg

SEQ ID NO: 8616 - DNA, 20 bp, Artificial
  20-mer unique DNA sequence
tgggcccggaatgcatgtag

SEQ ID NO: 8617 - DNA, 20 bp, Artificial
  20-mer unique DNA sequence
gtggtccggaatatgggggg

SEQ ID NO: 8618 - DNA, 20 bp, Artificial
  20-mer unique DNA sequence
agcgagaacggtaggcatgg

SEQ ID NO: 8619 - DNA, 20 bp, Artificial
  20-mer unique DNA sequence
acgggtggggggtatggctc

SEQ ID NO: 8620 - DNA, 20 bp, Artificial
  20-mer unique DNA sequence
ttgatgattgaaccccccgg

SEQ ID NO: 8621 - DNA, 20 bp, Artificial
  20-mer unique DNA sequence
gacgcccccgatgttgtacc

SEQ ID NO: 8622 - DNA, 20 bp, Artificial
  20-mer unique DNA sequence
aggggtactgaatggccgcg

SEQ ID NO: 8623 - DNA, 20 bp, Artificial
  20-mer unique DNA sequence
aggtccgtccagtccgtcgt

SEQ ID NO: 8624 - DNA, 20 bp, Artificial
  20-mer unique DNA sequence
tgcaccatggtccgactcaa

SEQ ID NO: 8625 - DNA, 20 bp, Artificial
  20-mer unique DNA sequence
tccgcgttccgttcttcctc

SEQ ID NO: 8626 - DNA, 20 bp, Artificial
  20-mer unique DNA sequence
cagcaaacgccggaggtcag

SEQ ID NO: 8627 - DNA, 20 bp, Artificial
  20-mer unique DNA sequence
gttcatacggcggcagaccc

SEQ ID NO: 8628 - DNA, 20 bp, Artificial
  20-mer unique DNA sequence
aacaacgacagccgcaccga

SEQ ID NO: 8629 - DNA, 20 bp, Artificial
  20-mer unique DNA sequence
gcggtgctaatacgggtcgg

SEQ ID NO: 8630 - DNA, 20 bp, Artificial
  20-mer unique DNA sequence
acgttgcatatccggggctc

SEQ ID NO: 8631 - DNA, 20 bp, Artificial
  20-mer unique DNA sequence
gttcttgctccccgggtcgt

SEQ ID NO: 8632 - DNA, 20 bp, Artificial
  20-mer unique DNA sequence
gctagggttgcttcgggtgg

SEQ ID NO: 8633 - DNA, 20 bp, Artificial
  20-mer unique DNA sequence
ggggtgtggtggcggtacga

SEQ ID NO: 8634 - DNA, 20 bp, Artificial
  20-mer unique DNA sequence
gctgctcaggtccgcaatgt

SEQ ID NO: 8635 - DNA, 20 bp, Artificial
  20-mer unique DNA sequence
atccgcagcctggaccaact

SEQ ID NO: 8636 - DNA, 20 bp, Artificial
  20-mer unique DNA sequence
taccccccctgacacgcatt

SEQ ID NO: 8637 - DNA, 20 bp, Artificial
  20-mer unique DNA sequence
aaaacgcgaggagggcaggg

SEQ ID NO: 8638 - DNA, 20 bp, Artificial
  20-mer unique DNA sequence
gaccatcagcgcgcccagtt

SEQ ID NO: 8639 - DNA, 20 bp, Artificial
  20-mer unique DNA sequence
ctccgcgcgtgtggtatagc

SEQ ID NO: 8640 - DNA, 20 bp, Artificial
  20-mer unique DNA sequence
ggctggggtcctttgctcgc

SEQ ID NO: 8641 - DNA, 20 bp, Artificial
  20-mer unique DNA sequence
cggacgcagagaaaacccgg

SEQ ID NO: 8642 - DNA, 20 bp, Artificial
  20-mer unique DNA sequence
tgtcgggcgaagggtcaaga

SEQ ID NO: 8643 - DNA, 20 bp, Artificial
  20-mer unique DNA sequence
acactgttcttccgcccgtt

SEQ ID NO: 8644 - DNA, 20 bp, Artificial
  20-mer unique DNA sequence
ggttcccgaatggtggtccc

SEQ ID NO: 8645 - DNA, 20 bp, Artificial
  20-mer unique DNA sequence
gggccgtccaatcaccagtt

SEQ ID NO: 8646 - DNA, 20 bp, Artificial
  20-mer unique DNA sequence
gcaccgccacgtacatccgg

SEQ ID NO: 8647 - DNA, 20 bp, Artificial
  20-mer unique DNA sequence
agcggacgcgataagaggga

SEQ ID NO: 8648 - DNA, 20 bp, Artificial
  20-mer unique DNA sequence
actcgctgaggtcaggttcg

SEQ ID NO: 8649 - DNA, 20 bp, Artificial
  20-mer unique DNA sequence
gcagtgtcgcacggagtttc

SEQ ID NO: 8650 - DNA, 20 bp, Artificial
  20-mer unique DNA sequence
ggatggggaggcgaggactg

SEQ ID NO: 8651 - DNA, 20 bp, Artificial
  20-mer unique DNA sequence
agcgccgtctgcaaagtccg

SEQ ID NO: 8652 - DNA, 20 bp, Artificial
  20-mer unique DNA sequence
cgaagacgcgccgaaggatt

SEQ ID NO: 8653 - DNA, 20 bp, Artificial
  20-mer unique DNA sequence
ggaggaaagggggcaagtgg

SEQ ID NO: 8654 - DNA, 20 bp, Artificial
  20-mer unique DNA sequence
atgcagacgcccacctttcg

SEQ ID NO: 8655 - DNA, 20 bp, Artificial
  20-mer unique DNA sequence
ttaaattggcgcggtggtcg

SEQ ID NO: 8656 - DNA, 20 bp, Artificial
  20-mer unique DNA sequence
cttatccggaccgcccctcc

SEQ ID NO: 8657 - DNA, 20 bp, Artificial
  20-mer unique DNA sequence
cagctgtgcaggaggggcgt

SEQ ID NO: 8658 - DNA, 20 bp, Artificial
  20-mer unique DNA sequence
caagttcgcggcgcagtttt

SEQ ID NO: 8659 - DNA, 20 bp, Artificial
  20-mer unique DNA sequence
agctcgtgagacggtcgtga

SEQ ID NO: 8660 - DNA, 20 bp, Artificial
  20-mer unique DNA sequence
cagtagcaggcgggcgattc

SEQ ID NO: 8661 - DNA, 20 bp, Artificial
  20-mer unique DNA sequence
aatcagtgggcgcgcaggtc

SEQ ID NO: 8662 - DNA, 20 bp, Artificial
  20-mer unique DNA sequence
tggggcgccgctatacctaa

SEQ ID NO: 8663 - DNA, 20 bp, Artificial
  20-mer unique DNA sequence
agtcgggcgcgttctctgca

SEQ ID NO: 8664 - DNA, 20 bp, Artificial
  20-mer unique DNA sequence
gccgcctcccctgtctccta

SEQ ID NO: 8665 - DNA, 20 bp, Artificial
  20-mer unique DNA sequence
gggtagcacatccgtaggca

SEQ ID NO: 8666 - DNA, 20 bp, Artificial
  20-mer unique DNA sequence
aggggccgcacgtattgagt

SEQ ID NO: 8667 - DNA, 20 bp, Artificial
  20-mer unique DNA sequence
ttctactcccagcgcagggc

SEQ ID NO: 8668 - DNA, 20 bp, Artificial
  20-mer unique DNA sequence
agcaggtgcacgcgattcta

SEQ ID NO: 8669 - DNA, 20 bp, Artificial
  20-mer unique DNA sequence
tttggcgctcgactatcgga

SEQ ID NO: 8670 - DNA, 20 bp, Artificial
  20-mer unique DNA sequence
accggaggaggacaggggac

SEQ ID NO: 8671 - DNA, 20 bp, Artificial
  20-mer unique DNA sequence
tcttgccacgccttttgtcg

SEQ ID NO: 8672 - DNA, 20 bp, Artificial
  20-mer unique DNA sequence
ctgtccgctaaccgcccgat

SEQ ID NO: 8673 - DNA, 20 bp, Artificial
  20-mer unique DNA sequence
cgatcgcccttaccacagga

SEQ ID NO: 8674 - DNA, 20 bp, Artificial
  20-mer unique DNA sequence
cctggtcagtcgacgcgaat

SEQ ID NO: 8675 - DNA, 20 bp, Artificial
  20-mer unique DNA sequence
atacgcgctgcccggataaa

SEQ ID NO: 8676 - DNA, 20 bp, Artificial
  20-mer unique DNA sequence
atcgcgcagtgtactccgtt

SEQ ID NO: 8677 - DNA, 20 bp, Artificial
  20-mer unique DNA sequence
cattacgcaggggacggctt

SEQ ID NO: 8678 - DNA, 20 bp, Artificial
  20-mer unique DNA sequence
atagtctccggcatcgcgtc

SEQ ID NO: 8679 - DNA, 20 bp, Artificial
  20-mer unique DNA sequence
gggctgtggatgtcgtcgga

SEQ ID NO: 8680 - DNA, 20 bp, Artificial
  20-mer unique DNA sequence
tacgacacggtcctgtccca

SEQ ID NO: 8681 - DNA, 20 bp, Artificial
  20-mer unique DNA sequence
agtgcctcggaagcccacat

SEQ ID NO: 8682 - DNA, 20 bp, Artificial
  20-mer unique DNA sequence
aaatagcggcccgtgttgga

SEQ ID NO: 8683 - DNA, 20 bp, Artificial
  20-mer unique DNA sequence
tcgggccctaggcaaatgtt

SEQ ID NO: 8684 - DNA, 20 bp, Artificial
  20-mer unique DNA sequence
ccgcggatgccgattgagtt

SEQ ID NO: 8685 - DNA, 20 bp, Artificial
  20-mer unique DNA sequence
ttcgggtaccctgcaacacc

SEQ ID NO: 8686 - DNA, 20 bp, Artificial
  20-mer unique DNA sequence
caacgggttgcaccgggtta

SEQ ID NO: 8687 - DNA, 20 bp, Artificial
  20-mer unique DNA sequence
tgacgtgctcacgtgcatcc

SEQ ID NO: 8688 - DNA, 20 bp, Artificial
  20-mer unique DNA sequence
acacggctgacgtgacggta

SEQ ID NO: 8689 - DNA, 20 bp, Artificial
  20-mer unique DNA sequence
atcggtccggtacccgttca

SEQ ID NO: 8690 - DNA, 20 bp, Artificial
  20-mer unique DNA sequence
acggtcaagcgacaggtgtg

SEQ ID NO: 8691 - DNA, 20 bp, Artificial
  20-mer unique DNA sequence
gcgaccacggagcacgtatt

SEQ ID NO: 8692 - DNA, 20 bp, Artificial
  20-mer unique DNA sequence
agaaacgtccggtcaggcga

SEQ ID NO: 8693 - DNA, 20 bp, Artificial
  20-mer unique DNA sequence
ggcagttgcatcggcctact

SEQ ID NO: 8694 - DNA, 20 bp, Artificial
  20-mer unique DNA sequence
agtgtatggacgctgcggac

SEQ ID NO: 8695 - DNA, 20 bp, Artificial
  20-mer unique DNA sequence
acactgtcaccgtgcgtcaa

SEQ ID NO: 8696 - DNA, 20 bp, Artificial
  20-mer unique DNA sequence
ctacgactcacgcaccccca

SEQ ID NO: 8697 - DNA, 20 bp, Artificial
  20-mer unique DNA sequence
cttcgatgaaaccgctccgc

SEQ ID NO: 8698 - DNA, 20 bp, Artificial
  20-mer unique DNA sequence
gcctattttgccggtggtgg

SEQ ID NO: 8699 - DNA, 20 bp, Artificial
  20-mer unique DNA sequence
tcccatatccacgcccgtcc

SEQ ID NO: 8700 - DNA, 20 bp, Artificial
  20-mer unique DNA sequence
agagcacaagcgcgcagagg

SEQ ID NO: 8701 - DNA, 20 bp, Artificial
  20-mer unique DNA sequence
ttccgcctcccaccgtacaa

SEQ ID NO: 8702 - DNA, 20 bp, Artificial
  20-mer unique DNA sequence
gacctcgagtacggagcgtt

SEQ ID NO: 8703 - DNA, 20 bp, Artificial
  20-mer unique DNA sequence
tagatgtcggacgtcccggt

SEQ ID NO: 8704 - DNA, 20 bp, Artificial
  20-mer unique DNA sequence
tctgcgacaggcgtcgctat

SEQ ID NO: 8705 - DNA, 20 bp, Artificial
  20-mer unique DNA sequence
ctcccagagctcggcaatga

SEQ ID NO: 8706 - DNA, 20 bp, Artificial
  20-mer unique DNA sequence
gtgcaccgctgacggttatc

SEQ ID NO: 8707 - DNA, 20 bp, Artificial
  20-mer unique DNA sequence
ctaagggcgtatgaccgcgt

SEQ ID NO: 8708 - DNA, 20 bp, Artificial
  20-mer unique DNA sequence
cgccgtaaaaacccgcaaag

SEQ ID NO: 8709 - DNA, 20 bp, Artificial
  20-mer unique DNA sequence
ggtggggcttatcgcgggac

SEQ ID NO: 8710 - DNA, 20 bp, Artificial
  20-mer unique DNA sequence
tgaagtggcgggagcgtagc

SEQ ID NO: 8711 - DNA, 20 bp, Artificial
  20-mer unique DNA sequence
aggtcgggcagtgggtttcg

SEQ ID NO: 8712 - DNA, 20 bp, Artificial
  20-mer unique DNA sequence
gagacaccgagcccccaagg

SEQ ID NO: 8713 - DNA, 20 bp, Artificial
  20-mer unique DNA sequence
gcgtgcatcgggtcacagtt

SEQ ID NO: 8714 - DNA, 20 bp, Artificial
  20-mer unique DNA sequence
ttcgctactcgggggcatcc

SEQ ID NO: 8715 - DNA, 20 bp, Artificial
  20-mer unique DNA sequence
tggcgtgggaggagtgctga

SEQ ID NO: 8716 - DNA, 20 bp, Artificial
  20-mer unique DNA sequence
gggcggtgtcgtaagtgcgg

SEQ ID NO: 8717 - DNA, 20 bp, Artificial
  20-mer unique DNA sequence
gcccagcctatgctagacac

SEQ ID NO: 8718 - DNA, 20 bp, Artificial
  20-mer unique DNA sequence
ttacgggaaggtggatgggg

SEQ ID NO: 8719 - DNA, 20 bp, Artificial
  20-mer unique DNA sequence
tgccgttcctttctcgccct

SEQ ID NO: 8720 - DNA, 20 bp, Artificial
  20-mer unique DNA sequence
tgcaggacaggggtagcgcc

SEQ ID NO: 8721 - DNA, 20 bp, Artificial
  20-mer unique DNA sequence
gcggtttgtaggtcgggtcc

SEQ ID NO: 8722 - DNA, 20 bp, Artificial
  20-mer unique DNA sequence
tggcagcgagccatgtgtga

SEQ ID NO: 8723 - DNA, 20 bp, Artificial
  20-mer unique DNA sequence
ggcaacgggtgttaccgagt

SEQ ID NO: 8724 - DNA, 20 bp, Artificial
  20-mer unique DNA sequence
gggttcccccggatgatggt

SEQ ID NO: 8725 - DNA, 20 bp, Artificial
  20-mer unique DNA sequence
gggctcgcgtgtttcgggat

SEQ ID NO: 8726 - DNA, 20 bp, Artificial
  20-mer unique DNA sequence
cggggcgagtttggcagcta

SEQ ID NO: 8727 - DNA, 20 bp, Artificial
  20-mer unique DNA sequence
ggtcggaacgcgtaggcatg

SEQ ID NO: 8728 - DNA, 20 bp, Artificial
  20-mer unique DNA sequence
tagccctcgtccaatgccgc

SEQ ID NO: 8729 - DNA, 20 bp, Artificial
  20-mer unique DNA sequence
ggaacaacaggtacgcccgc

SEQ ID NO: 8730 - DNA, 20 bp, Artificial
  20-mer unique DNA sequence
tcagtccgcactggtaccgt

SEQ ID NO: 8731 - DNA, 20 bp, Artificial
  20-mer unique DNA sequence
agacgctgaggcgaagtcgt

SEQ ID NO: 8732 - DNA, 20 bp, Artificial
  20-mer unique DNA sequence
ccgctaccgagtcggcaaat

SEQ ID NO: 8733 - DNA, 20 bp, Artificial
  20-mer unique DNA sequence
cgggctcgattaggcactca

SEQ ID NO: 8734 - DNA, 20 bp, Artificial
  20-mer unique DNA sequence
agtgcgcagcctatcgacca

SEQ ID NO: 8735 - DNA, 20 bp, Artificial
  20-mer unique DNA sequence
tcatgccgcagtcctggtca

SEQ ID NO: 8736 - DNA, 20 bp, Artificial
  20-mer unique DNA sequence
atagggtccggcgctcaagg

SEQ ID NO: 8737 - DNA, 20 bp, Artificial
  20-mer unique DNA sequence
ggaagccccatacgcccagc

SEQ ID NO: 8738 - DNA, 20 bp, Artificial
  20-mer unique DNA sequence
atgcgtcgagcagtgtggtt

SEQ ID NO: 8739 - DNA, 20 bp, Artificial
  20-mer unique DNA sequence
atgccccctttccaacgctt

SEQ ID NO: 8740 - DNA, 20 bp, Artificial
  20-mer unique DNA sequence
gctccgcggcctacacccat

SEQ ID NO: 8741 - DNA, 20 bp, Artificial
  20-mer unique DNA sequence
tgagaaggaccagccgccga

SEQ ID NO: 8742 - DNA, 20 bp, Artificial
  20-mer unique DNA sequence
ggcgttgctttgggttggaa

SEQ ID NO: 8743 - DNA, 20 bp, Artificial
  20-mer unique DNA sequence
tccctgcctaccccctgctc

SEQ ID NO: 8744 - DNA, 20 bp, Artificial
  20-mer unique DNA sequence
agggttggccgaatggggac

SEQ ID NO: 8745 - DNA, 20 bp, Artificial
  20-mer unique DNA sequence
gcgcccgatatattgccgtt

SEQ ID NO: 8746 - DNA, 20 bp, Artificial
  20-mer unique DNA sequence
ggtggtgggtggcgtctgtg

SEQ ID NO: 8747 - DNA, 20 bp, Artificial
  20-mer unique DNA sequence
gaggttggggattgggcgtg

SEQ ID NO: 8748 - DNA, 20 bp, Artificial
  20-mer unique DNA sequence
catctgtcgcgctgaccaag

SEQ ID NO: 8749 - DNA, 20 bp, Artificial
  20-mer unique DNA sequence
actccgagtggctatgcacg

SEQ ID NO: 8750 - DNA, 20 bp, Artificial
  20-mer unique DNA sequence
ttcagggcgttcggtagggg

SEQ ID NO: 8751 - DNA, 20 bp, Artificial
  20-mer unique DNA sequence
tccgttcctccatacgcctt

SEQ ID NO: 8752 - DNA, 20 bp, Artificial
  20-mer unique DNA sequence
ttttacccggagccgctctt

SEQ ID NO: 8753 - DNA, 20 bp, Artificial
  20-mer unique DNA sequence
gccgctctgcgacatctagt

SEQ ID NO: 8754 - DNA, 20 bp, Artificial
  20-mer unique DNA sequence
tttccggtgacgccggttga

SEQ ID NO: 8755 - DNA, 20 bp, Artificial
  20-mer unique DNA sequence
acgtagcagcctggcgtgaa

SEQ ID NO: 8756 - DNA, 20 bp, Artificial
  20-mer unique DNA sequence
gccggggggaattctatgct

SEQ ID NO: 8757 - DNA, 20 bp, Artificial
  20-mer unique DNA sequence
ttgggataggtgcgtccgga

SEQ ID NO: 8758 - DNA, 20 bp, Artificial
  20-mer unique DNA sequence
cctctggggttcttcggcgc

SEQ ID NO: 8759 - DNA, 20 bp, Artificial
  20-mer unique DNA sequence
acccgatgcccaagccctat

SEQ ID NO: 8760 - DNA, 20 bp, Artificial
  20-mer unique DNA sequence
gccgtatgaggggtctcgtt

SEQ ID NO: 8761 - DNA, 20 bp, Artificial
  20-mer unique DNA sequence
tgtcttgcaggtccgccatc

SEQ ID NO: 8762 - DNA, 20 bp, Artificial
  20-mer unique DNA sequence
tgttccgaggggtttgcgtg

SEQ ID NO: 8763 - DNA, 20 bp, Artificial
  20-mer unique DNA sequence
tgccgaaacccctggaaggt

SEQ ID NO: 8764 - DNA, 20 bp, Artificial
  20-mer unique DNA sequence
gccttccctagggccacatt

SEQ ID NO: 8765 - DNA, 20 bp, Artificial
  20-mer unique DNA sequence
ttgcagagcctgcgatgagt

SEQ ID NO: 8766 - DNA, 20 bp, Artificial
  20-mer unique DNA sequence
ttcacccgtttccgtccgtt

SEQ ID NO: 8767 - DNA, 20 bp, Artificial
  20-mer unique DNA sequence
gcaatgtacccgcgcccaag

SEQ ID NO: 8768 - DNA, 20 bp, Artificial
  20-mer unique DNA sequence
gctgcacgcgtgtaagtcag

SEQ ID NO: 8769 - DNA, 20 bp, Artificial
  20-mer unique DNA sequence
acacaggggccctcgatgaa

SEQ ID NO: 8770 - DNA, 20 bp, Artificial
  20-mer unique DNA sequence
tccaagaagtagcccccccg

SEQ ID NO: 8771 - DNA, 20 bp, Artificial
  20-mer unique DNA sequence
ggggggacaaggtgcggaat

SEQ ID NO: 8772 - DNA, 20 bp, Artificial
  20-mer unique DNA sequence
aatgcgtccacgggaacctc

SEQ ID NO: 8773 - DNA, 20 bp, Artificial
  20-mer unique DNA sequence
ggcaacttcccgtaggacga

SEQ ID NO: 8774 - DNA, 20 bp, Artificial
  20-mer unique DNA sequence
cgcgcaccggtaagcaaccg

SEQ ID NO: 8775 - DNA, 20 bp, Artificial
  20-mer unique DNA sequence
cagaaagcacacggcgacgg

SEQ ID NO: 8776 - DNA, 20 bp, Artificial
  20-mer unique DNA sequence
cggcctcggtttggtggtgt

SEQ ID NO: 8777 - DNA, 20 bp, Artificial
  20-mer unique DNA sequence
gcggtaataagggcgggggt

SEQ ID NO: 8778 - DNA, 20 bp, Artificial
  20-mer unique DNA sequence
atagcctcgggcgtcgatga

SEQ ID NO: 8779 - DNA, 20 bp, Artificial
  20-mer unique DNA sequence
gtggtccaaggcgtcgatga

SEQ ID NO: 8780 - DNA, 20 bp, Artificial
  20-mer unique DNA sequence
gaaacctcacggggtgcctg

SEQ ID NO: 8781 - DNA, 20 bp, Artificial
  20-mer unique DNA sequence
ggggaaaggtgtcgcatgcg

SEQ ID NO: 8782 - DNA, 20 bp, Artificial
  20-mer unique DNA sequence
gcgctcgttaatgctcacga

SEQ ID NO: 8783 - DNA, 20 bp, Artificial
  20-mer unique DNA sequence
acgcagagaggcgcagaagc

SEQ ID NO: 8784 - DNA, 20 bp, Artificial
  20-mer unique DNA sequence
tgctcgtattgccttggtcc

SEQ ID NO: 8785 - DNA, 20 bp, Artificial
  20-mer unique DNA sequence
ggcgtgggcagagagaggtg

SEQ ID NO: 8786 - DNA, 20 bp, Artificial
  20-mer unique DNA sequence
ccaaaagggcatggtccacg

SEQ ID NO: 8787 - DNA, 20 bp, Artificial
  20-mer unique DNA sequence
cgggacggagagggctgact

SEQ ID NO: 8788 - DNA, 20 bp, Artificial
  20-mer unique DNA sequence
tgagcctccgagtggtgtgt

SEQ ID NO: 8789 - DNA, 20 bp, Artificial
  20-mer unique DNA sequence
acgtgactctagcgcagcga

SEQ ID NO: 8790 - DNA, 20 bp, Artificial
  20-mer unique DNA sequence
cattacgtagggacggcttg

SEQ ID NO: 8791 - DNA, 20 bp, Artificial
  20-mer unique DNA sequence
acatagtgcaggtccgtcgc

SEQ ID NO: 8792 - DNA, 20 bp, Artificial
  20-mer unique DNA sequence
ctccacctcccgccttctcc

SEQ ID NO: 8793 - DNA, 20 bp, Artificial
  20-mer unique DNA sequence
ggacgtcacctgaccgtctt

SEQ ID NO: 8794 - DNA, 20 bp, Artificial
  20-mer unique DNA sequence
agttgtagggtcggggggag

SEQ ID NO: 8795 - DNA, 20 bp, Artificial
  20-mer unique DNA sequence
atgaggggttcgcgtgtggg

SEQ ID NO: 8796 - DNA, 20 bp, Artificial
  20-mer unique DNA sequence
ccccggctctggtcttctcc

SEQ ID NO: 8797 - DNA, 20 bp, Artificial
  20-mer unique DNA sequence
ggccgcaccaacatcttccg

SEQ ID NO: 8798 - DNA, 20 bp, Artificial
  20-mer unique DNA sequence
cgccgtatttccccagttcg

SEQ ID NO: 8799 - DNA, 20 bp, Artificial
  20-mer unique DNA sequence
cgtccgggctgacgtaactt

SEQ ID NO: 8800 - DNA, 20 bp, Artificial
  20-mer unique DNA sequence
gagtcggcgggctttcaggt

SEQ ID NO: 8801 - DNA, 20 bp, Artificial
  20-mer unique DNA sequence
aggtgtgggtgttctggcgc

SEQ ID NO: 8802 - DNA, 20 bp, Artificial
  20-mer unique DNA sequence
cgccccctcgtcaacaccct

SEQ ID NO: 8803 - DNA, 20 bp, Artificial
  20-mer unique DNA sequence
ctcccctgttctcgcccacc

SEQ ID NO: 8804 - DNA, 20 bp, Artificial
  20-mer unique DNA sequence
ggaagtgggccgtaaagcga

SEQ ID NO: 8805 - DNA, 20 bp, Artificial
  20-mer unique DNA sequence
gcttgtgcaagccgatacgc

SEQ ID NO: 8806 - DNA, 20 bp, Artificial
  20-mer unique DNA sequence
atcacgccctcccacttcgt

SEQ ID NO: 8807 - DNA, 20 bp, Artificial
  20-mer unique DNA sequence
tttgcgtggttcgctgcgta

SEQ ID NO: 8808 - DNA, 20 bp, Artificial
  20-mer unique DNA sequence
tcgagtcgccttagacccgt

SEQ ID NO: 8809 - DNA, 20 bp, Artificial
  20-mer unique DNA sequence
accctatgcccccttcaccg

SEQ ID NO: 8810 - DNA, 20 bp, Artificial
  20-mer unique DNA sequence
ccagaccgcgagccgaagaa

SEQ ID NO: 8811 - DNA, 20 bp, Artificial
  20-mer unique DNA sequence
tggatcccgtgggccgtatt

SEQ ID NO: 8812 - DNA, 20 bp, Artificial
  20-mer unique DNA sequence
ggccggattagtgccaccta

SEQ ID NO: 8813 - DNA, 20 bp, Artificial
  20-mer unique DNA sequence
cggtgtacgtcgaaccgttg

SEQ ID NO: 8814 - DNA, 20 bp, Artificial
  20-mer unique DNA sequence
accgtactcgcgagagtgga

SEQ ID NO: 8815 - DNA, 20 bp, Artificial
  20-mer unique DNA sequence
tgccgtgaccttatgctggt

SEQ ID NO: 8816 - DNA, 20 bp, Artificial
  20-mer unique DNA sequence
aattggcccactacccgtcg

SEQ ID NO: 8817 - DNA, 20 bp, Artificial
  20-mer unique DNA sequence
gctgacctaaagacggcggg

SEQ ID NO: 8818 - DNA, 20 bp, Artificial
  20-mer unique DNA sequence
gacgttaaatggcgagcgcg

SEQ ID NO: 8819 - DNA, 20 bp, Artificial
  20-mer unique DNA sequence
gcgtcgcggttatcgtgctt

SEQ ID NO: 8820 - DNA, 20 bp, Artificial
  20-mer unique DNA sequence
ataggcccggaactcgcact

SEQ ID NO: 8821 - DNA, 20 bp, Artificial
  20-mer unique DNA sequence
tcatcgggaactccactgcg

SEQ ID NO: 8822 - DNA, 20 bp, Artificial
  20-mer unique DNA sequence
tggagcccggacaggactaa

SEQ ID NO: 8823 - DNA, 20 bp, Artificial
  20-mer unique DNA sequence
actacacggaccagcgggaa

SEQ ID NO: 8824 - DNA, 20 bp, Artificial
  20-mer unique DNA sequence
ttgtccctcattccccgcca

SEQ ID NO: 8825 - DNA, 20 bp, Artificial
  20-mer unique DNA sequence
ccagcggcgttgctttcaga

SEQ ID NO: 8826 - DNA, 20 bp, Artificial
  20-mer unique DNA sequence
gagcacggggtatccaatgc

SEQ ID NO: 8827 - DNA, 20 bp, Artificial
  20-mer unique DNA sequence
tcgttgcgcccttgttcacc

SEQ ID NO: 8828 - DNA, 20 bp, Artificial
  20-mer unique DNA sequence
ggtcatggtagggtggcggg

SEQ ID NO: 8829 - DNA, 20 bp, Artificial
  20-mer unique DNA sequence
gttgcactgtactcgccggc

SEQ ID NO: 8830 - DNA, 20 bp, Artificial
  20-mer unique DNA sequence
gtcttctggaggtgcgggga

SEQ ID NO: 8831 - DNA, 20 bp, Artificial
  20-mer unique DNA sequence
cgaggaaacggtgatcgggt

SEQ ID NO: 8832 - DNA, 20 bp, Artificial
  20-mer unique DNA sequence
tgaagcccgggtgataccga

SEQ ID NO: 8833 - DNA, 20 bp, Artificial
  20-mer unique DNA sequence
tgctgcctggacgcctgtta

SEQ ID NO: 8834 - DNA, 20 bp, Artificial
  20-mer unique DNA sequence
agagtgccgagcactgagac

SEQ ID NO: 8835 - DNA, 20 bp, Artificial
  20-mer unique DNA sequence
agtccctagctacaggcgga

SEQ ID NO: 8836 - DNA, 20 bp, Artificial
  20-mer unique DNA sequence
ccagcgtgtcgtggacagat

SEQ ID NO: 8837 - DNA, 20 bp, Artificial
  20-mer unique DNA sequence
actctgcgagtccgtgaagc

SEQ ID NO: 8838 - DNA, 20 bp, Artificial
  20-mer unique DNA sequence
gccaagggtggggcgaaatc

SEQ ID NO: 8839 - DNA, 20 bp, Artificial
  20-mer unique DNA sequence
ggggcgggagtcaataggca

SEQ ID NO: 8840 - DNA, 20 bp, Artificial
  20-mer unique DNA sequence
acttccggcacgaccgatag

SEQ ID NO: 8841 - DNA, 20 bp, Artificial
  20-mer unique DNA sequence
acccggttagcctcgcatac

SEQ ID NO: 8842 - DNA, 20 bp, Artificial
  20-mer unique DNA sequence
catcaagcagggcgaggcca

SEQ ID NO: 8843 - DNA, 20 bp, Artificial
  20-mer unique DNA sequence
ccacctgtcccaaccagcca

SEQ ID NO: 8844 - DNA, 20 bp, Artificial
  20-mer unique DNA sequence
tggtagcctcgtacaggcga

SEQ ID NO: 8845 - DNA, 20 bp, Artificial
  20-mer unique DNA sequence
taggacaaggccgcggggac

SEQ ID NO: 8846 - DNA, 20 bp, Artificial
  20-mer unique DNA sequence
gtgttgagggaagcgaggcg

SEQ ID NO: 8847 - DNA, 20 bp, Artificial
  20-mer unique DNA sequence
actgacgggagggcatacgg

SEQ ID NO: 8848 - DNA, 20 bp, Artificial
  20-mer unique DNA sequence
cccgcaagaaaatgtgccct

SEQ ID NO: 8849 - DNA, 20 bp, Artificial
  20-mer unique DNA sequence
accacaccccgttccctcgt

SEQ ID NO: 8850 - DNA, 20 bp, Artificial
  20-mer unique DNA sequence
aggactccgctagtgccctt

SEQ ID NO: 8851 - DNA, 20 bp, Artificial
  20-mer unique DNA sequence
aacacagctcggagcctcac

SEQ ID NO: 8852 - DNA, 20 bp, Artificial
  20-mer unique DNA sequence
tgacctcgtgggacgactgt

SEQ ID NO: 8853 - DNA, 20 bp, Artificial
  20-mer unique DNA sequence
cgctcgacgctctgtgacaa

SEQ ID NO: 8854 - DNA, 20 bp, Artificial
  20-mer unique DNA sequence
tgttaagtgccacggtcgct

SEQ ID NO: 8855 - DNA, 20 bp, Artificial
  20-mer unique DNA sequence
aggtcggacaccctcacgta

SEQ ID NO: 8856 - DNA, 20 bp, Artificial
  20-mer unique DNA sequence
tttggggggagttggcgatg

SEQ ID NO: 8857 - DNA, 20 bp, Artificial
  20-mer unique DNA sequence
cccccctgagaacgcaccaa

SEQ ID NO: 8858 - DNA, 20 bp, Artificial
  20-mer unique DNA sequence
tggttaagccggtcgggggt

SEQ ID NO: 8859 - DNA, 20 bp, Artificial
  20-mer unique DNA sequence
gcgcccaatgaaagggtttg

SEQ ID NO: 8860 - DNA, 20 bp, Artificial
  20-mer unique DNA sequence
ttggatgccgtgtgacgaga

SEQ ID NO: 8861 - DNA, 20 bp, Artificial
  20-mer unique DNA sequence
agggcacgccttagtacacc

SEQ ID NO: 8862 - DNA, 20 bp, Artificial
  20-mer unique DNA sequence
atccaccggtccgggttagt

SEQ ID NO: 8863 - DNA, 20 bp, Artificial
  20-mer unique DNA sequence
gggcggtatcgtaactgcgg

SEQ ID NO: 8864 - DNA, 20 bp, Artificial
  20-mer unique DNA sequence
gtccggcgggtagagtggca

SEQ ID NO: 8865 - DNA, 20 bp, Artificial
  20-mer unique DNA sequence
cgttggtgataccggagggg

SEQ ID NO: 8866 - DNA, 20 bp, Artificial
  20-mer unique DNA sequence
tggcttgccacggggatctt

SEQ ID NO: 8867 - DNA, 20 bp, Artificial
  20-mer unique DNA sequence
tttcgggctgtaagtgcccc

SEQ ID NO: 8868 - DNA, 20 bp, Artificial
  20-mer unique DNA sequence
taatacctttcgccgcccca

SEQ ID NO: 8869 - DNA, 20 bp, Artificial
  20-mer unique DNA sequence
gcatgctgtcgtgttggcct

SEQ ID NO: 8870 - DNA, 20 bp, Artificial
  20-mer unique DNA sequence
ctgctgcggatggggttctg

SEQ ID NO: 8871 - DNA, 20 bp, Artificial
  20-mer unique DNA sequence
tggcgatggctttgcaggta

SEQ ID NO: 8872 - DNA, 20 bp, Artificial
  20-mer unique DNA sequence
agtgggagttggcggagcat

SEQ ID NO: 8873 - DNA, 20 bp, Artificial
  20-mer unique DNA sequence
aagcctcaagcccaacgcac

SEQ ID NO: 8874 - DNA, 20 bp, Artificial
  20-mer unique DNA sequence
aatccctgtccccccacgat

SEQ ID NO: 8875 - DNA, 20 bp, Artificial
  20-mer unique DNA sequence
atggacgggtttgagggggc

SEQ ID NO: 8876 - DNA, 20 bp, Artificial
  20-mer unique DNA sequence
gacaagtcgcacttgcaccc

SEQ ID NO: 8877 - DNA, 20 bp, Artificial
  20-mer unique DNA sequence
atctgccgacctacggaacc

SEQ ID NO: 8878 - DNA, 20 bp, Artificial
  20-mer unique DNA sequence
tgggtgcccagtaccgtgtt

SEQ ID NO: 8879 - DNA, 20 bp, Artificial
  20-mer unique DNA sequence
tggaggtcgacggaaactcg

SEQ ID NO: 8880 - DNA, 20 bp, Artificial
  20-mer unique DNA sequence
gtggcaccgaccggttacaa

SEQ ID NO: 8881 - DNA, 20 bp, Artificial
  20-mer unique DNA sequence
taacggatgagatccgcccg

SEQ ID NO: 8882 - DNA, 20 bp, Artificial
  20-mer unique DNA sequence
cgccgtaaacccccactttc

SEQ ID NO: 8883 - DNA, 20 bp, Artificial
  20-mer unique DNA sequence
agcaacccctgccccacaga

SEQ ID NO: 8884 - DNA, 20 bp, Artificial
  20-mer unique DNA sequence
agggcgacgggtaggatggt

SEQ ID NO: 8885 - DNA, 20 bp, Artificial
  20-mer unique DNA sequence
ggggattcggtgtcgttgga

SEQ ID NO: 8886 - DNA, 20 bp, Artificial
  20-mer unique DNA sequence
agtgtgcatgggcactgtct

SEQ ID NO: 8887 - DNA, 20 bp, Artificial
  20-mer unique DNA sequence
aaccctcttcgcgtccggct

SEQ ID NO: 8888 - DNA, 20 bp, Artificial
  20-mer unique DNA sequence
accaaaagccccctagcgcc

SEQ ID NO: 8889 - DNA, 20 bp, Artificial
  20-mer unique DNA sequence
agtcgcgacacgctgactct

SEQ ID NO: 8890 - DNA, 20 bp, Artificial
  20-mer unique DNA sequence
tgtcaaaaccgggtcaacct

SEQ ID NO: 8891 - DNA, 20 bp, Artificial
  20-mer unique DNA sequence
gcaatccgcccgaccactat

SEQ ID NO: 8892 - DNA, 20 bp, Artificial
  20-mer unique DNA sequence
gtaggcgggcatttggacga

SEQ ID NO: 8893 - DNA, 20 bp, Artificial
  20-mer unique DNA sequence
gcaacttcgggaaagcggac

SEQ ID NO: 8894 - DNA, 20 bp, Artificial
  20-mer unique DNA sequence
tgagagcgcacggtgcatta

SEQ ID NO: 8895 - DNA, 20 bp, Artificial
  20-mer unique DNA sequence
cgccgtgggtgatccgaaag

SEQ ID NO: 8896 - DNA, 20 bp, Artificial
  20-mer unique DNA sequence
gccggcagcagaaaggtagg

SEQ ID NO: 8897 - DNA, 20 bp, Artificial
  20-mer unique DNA sequence
tggacgtgcgccgaaagttg

SEQ ID NO: 8898 - DNA, 20 bp, Artificial
  20-mer unique DNA sequence
agtggaccgtacggcgattc

SEQ ID NO: 8899 - DNA, 20 bp, Artificial
  20-mer unique DNA sequence
tgtcacagggacccaggcat

SEQ ID NO: 8900 - DNA, 20 bp, Artificial
  20-mer unique DNA sequence
tttctgcccactaaggccgg

SEQ ID NO: 8901 - DNA, 20 bp, Artificial
  20-mer unique DNA sequence
gtcggagcggatcgcagttc

SEQ ID NO: 8902 - DNA, 20 bp, Artificial
  20-mer unique DNA sequence
agtagcccctgacttgacgc

SEQ ID NO: 8903 - DNA, 20 bp, Artificial
  20-mer unique DNA sequence
gacacagtcggctccgcaat

SEQ ID NO: 8904 - DNA, 20 bp, Artificial
  20-mer unique DNA sequence
cgcgggccttaacggagatg

SEQ ID NO: 8905 - DNA, 20 bp, Artificial
  20-mer unique DNA sequence
acttgcccgttccacccagc

SEQ ID NO: 8906 - DNA, 20 bp, Artificial
  20-mer unique DNA sequence
gtccctaagaacccccgcga

SEQ ID NO: 8907 - DNA, 20 bp, Artificial
  20-mer unique DNA sequence
cgatagggcaacgggggatg

SEQ ID NO: 8908 - DNA, 20 bp, Artificial
  20-mer unique DNA sequence
agggaggtggcgcttaggga

SEQ ID NO: 8909 - DNA, 20 bp, Artificial
  20-mer unique DNA sequence
caaacgtgggtgcaggctcg

SEQ ID NO: 8910 - DNA, 20 bp, Artificial
  20-mer unique DNA sequence
caacggcacagcaaacccca

SEQ ID NO: 8911 - DNA, 20 bp, Artificial
  20-mer unique DNA sequence
tgcctgtccctcgcctgatt

SEQ ID NO: 8912 - DNA, 20 bp, Artificial
  20-mer unique DNA sequence
tgtggatggcgcagttgggt

SEQ ID NO: 8913 - DNA, 20 bp, Artificial
  20-mer unique DNA sequence
ccgccttctcgctgcttgtc

SEQ ID NO: 8914 - DNA, 20 bp, Artificial
  20-mer unique DNA sequence
aagggcgaacgtcgcagact

SEQ ID NO: 8915 - DNA, 20 bp, Artificial
  20-mer unique DNA sequence
cgaggtcacgttaagcccct

SEQ ID NO: 8916 - DNA, 20 bp, Artificial
  20-mer unique DNA sequence
gcagcaagatcgcgtacggt

SEQ ID NO: 8917 - DNA, 20 bp, Artificial
  20-mer unique DNA sequence
gctgatctcacgcgactcca

SEQ ID NO: 8918 - DNA, 20 bp, Artificial
  20-mer unique DNA sequence
gtacaactgccggcctgcga

SEQ ID NO: 8919 - DNA, 20 bp, Artificial
  20-mer unique DNA sequence
gccggtaaagccatcgccac

SEQ ID NO: 8920 - DNA, 20 bp, Artificial
  20-mer unique DNA sequence
ggggggcgagtgaggtgttg

SEQ ID NO: 8921 - DNA, 20 bp, Artificial
  20-mer unique DNA sequence
ttccaagctactcgcgcccc

SEQ ID NO: 8922 - DNA, 20 bp, Artificial
  20-mer unique DNA sequence
gtagcggcccttttcggtga

SEQ ID NO: 8923 - DNA, 20 bp, Artificial
  20-mer unique DNA sequence
ctggcggggtgttggtggac

SEQ ID NO: 8924 - DNA, 20 bp, Artificial
  20-mer unique DNA sequence
cgtttcgccgttttcagcag

SEQ ID NO: 8925 - DNA, 20 bp, Artificial
  20-mer unique DNA sequence
ggcgatttcctttccttgcg

SEQ ID NO: 8926 - DNA, 20 bp, Artificial
  20-mer unique DNA sequence
aaacttttcggaacgccggg

SEQ ID NO: 8927 - DNA, 20 bp, Artificial
  20-mer unique DNA sequence
ctttatggggccggggttgc

SEQ ID NO: 8928 - DNA, 20 bp, Artificial
  20-mer unique DNA sequence
ttaaaccctcgcgcacacca

SEQ ID NO: 8929 - DNA, 20 bp, Artificial
  20-mer unique DNA sequence
cgtcgctacttgttcccccc

SEQ ID NO: 8930 - DNA, 20 bp, Artificial
  20-mer unique DNA sequence
tcatcgggggaagcacaggc

SEQ ID NO: 8931 - DNA, 20 bp, Artificial
  20-mer unique DNA sequence
acgtcgcggttatatcgggc

SEQ ID NO: 8932 - DNA, 20 bp, Artificial
  20-mer unique DNA sequence
ggctctttggcggttgtcgc

SEQ ID NO: 8933 - DNA, 20 bp, Artificial
  20-mer unique DNA sequence
ttccccaccccaacccgaat

SEQ ID NO: 8934 - DNA, 20 bp, Artificial
  20-mer unique DNA sequence
aaccccgttcgcagacgatc

SEQ ID NO: 8935 - DNA, 20 bp, Artificial
  20-mer unique DNA sequence
ggagcgtgtcaacaggggga

SEQ ID NO: 8936 - DNA, 20 bp, Artificial
  20-mer unique DNA sequence
ggccccttgcgtgttagctg

SEQ ID NO: 8937 - DNA, 20 bp, Artificial
  20-mer unique DNA sequence
gtcaatgcaatggcggtggg

SEQ ID NO: 8938 - DNA, 20 bp, Artificial
  20-mer unique DNA sequence
ctgcgtggcagtcccaaatg

SEQ ID NO: 8939 - DNA, 20 bp, Artificial
  20-mer unique DNA sequence
agatctacgcggtgacgcga

SEQ ID NO: 8940 - DNA, 20 bp, Artificial
  20-mer unique DNA sequence
cacgagccccgcacatacaa

SEQ ID NO: 8941 - DNA, 20 bp, Artificial
  20-mer unique DNA sequence
cagatcgcggtttgccttca

SEQ ID NO: 8942 - DNA, 20 bp, Artificial
  20-mer unique DNA sequence
taacccccgccaccaagaca

SEQ ID NO: 8943 - DNA, 20 bp, Artificial
  20-mer unique DNA sequence
acacacgaacccgcacaacc

SEQ ID NO: 8944 - DNA, 20 bp, Artificial
  20-mer unique DNA sequence
aacctttctgtgacggcggg

SEQ ID NO: 8945 - DNA, 20 bp, Artificial
  20-mer unique DNA sequence
accgcatacgccttccctca

SEQ ID NO: 8946 - DNA, 20 bp, Artificial
  20-mer unique DNA sequence
atccaagggtctcaatcgca

SEQ ID NO: 8947 - DNA, 20 bp, Artificial
  20-mer unique DNA sequence
tcacccttctttggctcgca

SEQ ID NO: 8948 - DNA, 20 bp, Artificial
  20-mer unique DNA sequence
ctacggccggttggattggg

SEQ ID NO: 8949 - DNA, 20 bp, Artificial
  20-mer unique DNA sequence
ccggcagaccccacgacaac

SEQ ID NO: 8950 - DNA, 20 bp, Artificial
  20-mer unique DNA sequence
cgcgtctcatcgatgccctt

SEQ ID NO: 8951 - DNA, 20 bp, Artificial
  20-mer unique DNA sequence
ccgatcaggggcgagggttt

SEQ ID NO: 8952 - DNA, 20 bp, Artificial
  20-mer unique DNA sequence
cgagacgcacccaacatccc

SEQ ID NO: 8953 - DNA, 20 bp, Artificial
  20-mer unique DNA sequence
tctttgatggggggcaagcg

SEQ ID NO: 8954 - DNA, 20 bp, Artificial
  20-mer unique DNA sequence
cagacctgttgaacgccgca

SEQ ID NO: 8955 - DNA, 20 bp, Artificial
  20-mer unique DNA sequence
gggccatctcgaacttgcac

SEQ ID NO: 8956 - DNA, 20 bp, Artificial
  20-mer unique DNA sequence
tctgttaagggcggcatggg

SEQ ID NO: 8957 - DNA, 20 bp, Artificial
  20-mer unique DNA sequence
ggaaagagagcggcacgggt

SEQ ID NO: 8958 - DNA, 20 bp, Artificial
  20-mer unique DNA sequence
aacgggcgggatgaggtggt

SEQ ID NO: 8959 - DNA, 20 bp, Artificial
  20-mer unique DNA sequence
cttcattcccccttcccgcg

SEQ ID NO: 8960 - DNA, 20 bp, Artificial
  20-mer unique DNA sequence
ttcaatacggcgggacacga

SEQ ID NO: 8961 - DNA, 20 bp, Artificial
  20-mer unique DNA sequence
cgggcaaggtacccccaact

SEQ ID NO: 8962 - DNA, 20 bp, Artificial
  20-mer unique DNA sequence
acaagccgccagagcctcaa

SEQ ID NO: 8963 - DNA, 20 bp, Artificial
  20-mer unique DNA sequence
aatggaaggtgcctgcgtga

SEQ ID NO: 8964 - DNA, 20 bp, Artificial
  20-mer unique DNA sequence
ctcacagttcgcggttgtcc

SEQ ID NO: 8965 - DNA, 20 bp, Artificial
  20-mer unique DNA sequence
accggccaattccttcctcc

SEQ ID NO: 8966 - DNA, 20 bp, Artificial
  20-mer unique DNA sequence
gcggctgggttagtgtggcg

SEQ ID NO: 8967 - DNA, 20 bp, Artificial
  20-mer unique DNA sequence
agccccgcccacccagtcta

SEQ ID NO: 8968 - DNA, 20 bp, Artificial
  20-mer unique DNA sequence
ccttatcgacgttcccgcca

SEQ ID NO: 8969 - DNA, 20 bp, Artificial
  20-mer unique DNA sequence
ccctcgctcctgtctcggct

SEQ ID NO: 8970 - DNA, 20 bp, Artificial
  20-mer unique DNA sequence
taagggccggggatcgtctc

SEQ ID NO: 8971 - DNA, 20 bp, Artificial
  20-mer unique DNA sequence
tatcgggcgggcatttcttg

SEQ ID NO: 8972 - DNA, 20 bp, Artificial
  20-mer unique DNA sequence
agcgcaaccccagcaaaatc

SEQ ID NO: 8973 - DNA, 20 bp, Artificial
  20-mer unique DNA sequence
actaggagcacatggggcgg

SEQ ID NO: 8974 - DNA, 20 bp, Artificial
  20-mer unique DNA sequence
cgccggccgctaggttacaa

SEQ ID NO: 8975 - DNA, 20 bp, Artificial
  20-mer unique DNA sequence
ccgatcacagcacaagccga

SEQ ID NO: 8976 - DNA, 20 bp, Artificial
  20-mer unique DNA sequence
tcctcgcctccaccaccata

SEQ ID NO: 8977 - DNA, 20 bp, Artificial
  20-mer unique DNA sequence
cagtttcacgcagagggggg

SEQ ID NO: 8978 - DNA, 20 bp, Artificial
  20-mer unique DNA sequence
ttcaagcaaagcgcagcacc

SEQ ID NO: 8979 - DNA, 20 bp, Artificial
  20-mer unique DNA sequence
ggcctcggggtggtaagcgt

SEQ ID NO: 8980 - DNA, 20 bp, Artificial
  20-mer unique DNA sequence
gtgagggggggtccaaaggc

SEQ ID NO: 8981 - DNA, 20 bp, Artificial
  20-mer unique DNA sequence
aagggccaatcaggggggtt

SEQ ID NO: 8982 - DNA, 20 bp, Artificial
  20-mer unique DNA sequence
cgtccactcacaagcgggca

SEQ ID NO: 8983 - DNA, 20 bp, Artificial
  20-mer unique DNA sequence
tgattttgccacgtggggga

SEQ ID NO: 8984 - DNA, 20 bp, Artificial
  20-mer unique DNA sequence
tgcattgtgaaccccccgtc

SEQ ID NO: 8985 - DNA, 20 bp, Artificial
  20-mer unique DNA sequence
ctagctcccgcccccagttt

SEQ ID NO: 8986 - DNA, 20 bp, Artificial
  20-mer unique DNA sequence
ttggggagaagaccggatgg

SEQ ID NO: 8987 - DNA, 20 bp, Artificial
  20-mer unique DNA sequence
cgacgcctcacgaaatgcac

SEQ ID NO: 8988 - DNA, 20 bp, Artificial
  20-mer unique DNA sequence
catccatccccatcgcacaa

SEQ ID NO: 8989 - DNA, 20 bp, Artificial
  20-mer unique DNA sequence
tcaatccagtcccaggcgga

SEQ ID NO: 8990 - DNA, 20 bp, Artificial
  20-mer unique DNA sequence
tgccggtaactacgtgtcgg

SEQ ID NO: 8991 - DNA, 20 bp, Artificial
  20-mer unique DNA sequence
acaaagggaggcgaggtccg

SEQ ID NO: 8992 - DNA, 20 bp, Artificial
  20-mer unique DNA sequence
gcacaggcgagggggagcta

SEQ ID NO: 8993 - DNA, 20 bp, Artificial
  20-mer unique DNA sequence
gtctccgggcggtcttgctg

SEQ ID NO: 8994 - DNA, 20 bp, Artificial
  20-mer unique DNA sequence
cgcggcaaaaggacgatcaa

SEQ ID NO: 8995 - DNA, 20 bp, Artificial
  20-mer unique DNA sequence
agggcgtggggagctttgag

SEQ ID NO: 8996 - DNA, 20 bp, Artificial
  20-mer unique DNA sequence
taggtgggaaatggacgggc

SEQ ID NO: 8997 - DNA, 20 bp, Artificial
  20-mer unique DNA sequence
tcaagagaacggccacccca

SEQ ID NO: 8998 - DNA, 20 bp, Artificial
  20-mer unique DNA sequence
gtgggtaaaggctgcgaggg

SEQ ID NO: 8999 - DNA, 20 bp, Artificial
  20-mer unique DNA sequence
ctaatccgtgccctcgcccc

SEQ ID NO: 9000 - DNA, 20 bp, Artificial
  20-mer unique DNA sequence
cccctccgcgtcccattcat

SEQ ID NO: 9001 - DNA, 20 bp, Artificial
  20-mer unique DNA sequence
cccgcccaaagtcctccaaa

SEQ ID NO: 9002 - DNA, 20 bp, Artificial
  20-mer unique DNA sequence
aacgaacggagggagcgtgg

SEQ ID NO: 9003 - DNA, 20 bp, Artificial
  20-mer unique DNA sequence
tcgttcttcccttcgtcccg

SEQ ID NO: 9004 - DNA, 20 bp, Artificial
  20-mer unique DNA sequence
gacggcgggttaggctcagg

SEQ ID NO: 9005 - DNA, 20 bp, Artificial
  20-mer unique DNA sequence
cggcaacaaaacccgcctaa

SEQ ID NO: 9006 - DNA, 20 bp, Artificial
  20-mer unique DNA sequence
tgaatgcccccgtccgtaag

SEQ ID NO: 9007 - DNA, 20 bp, Artificial
  20-mer unique DNA sequence
cgccctacccgccacatctc

SEQ ID NO: 9008 - DNA, 20 bp, Artificial
  20-mer unique DNA sequence
tgttcagtcgttggcagggg

SEQ ID NO: 9009 - DNA, 20 bp, Artificial
  20-mer unique DNA sequence
tccgtggtgggtgagaatgc

SEQ ID NO: 9010 - DNA, 20 bp, Artificial
  20-mer unique DNA sequence
tcgtcagtttggggcgtcct

SEQ ID NO: 9011 - DNA, 20 bp, Artificial
  20-mer unique DNA sequence
agccgggtctatgtggagca

SEQ ID NO: 9012 - DNA, 20 bp, Artificial
  20-mer unique DNA sequence
acaagccgttatcccgcccc

SEQ ID NO: 9013 - DNA, 20 bp, Artificial
  20-mer unique DNA sequence
agtttgtcggggcacgggta

SEQ ID NO: 9014 - DNA, 20 bp, Artificial
  20-mer unique DNA sequence
ttgcggtcgatgcggagtgt

SEQ ID NO: 9015 - DNA, 20 bp, Artificial
  20-mer unique DNA sequence
cggacacgacgaggacaggc

SEQ ID NO: 9016 - DNA, 20 bp, Artificial
  20-mer unique DNA sequence
ttaggatggtcgaggcgcgt

SEQ ID NO: 9017 - DNA, 20 bp, Artificial
  20-mer unique DNA sequence
aacgagggtgctggggaatg

SEQ ID NO: 9018 - DNA, 20 bp, Artificial
  20-mer unique DNA sequence
agggccgagcaagatgaacg

SEQ ID NO: 9019 - DNA, 20 bp, Artificial
  20-mer unique DNA sequence
tcgtccaccgccacagttcg

SEQ ID NO: 9020 - DNA, 20 bp, Artificial
  20-mer unique DNA sequence
gtcagggtcgggcaaaacgc

SEQ ID NO: 9021 - DNA, 20 bp, Artificial
  20-mer unique DNA sequence
tcctttaccgaccgcaccgt

SEQ ID NO: 9022 - DNA, 20 bp, Artificial
  20-mer unique DNA sequence
cttgtcctgccctgttgccg

SEQ ID NO: 9023 - DNA, 20 bp, Artificial
  20-mer unique DNA sequence
caacccgacccaaccacgtg

SEQ ID NO: 9024 - DNA, 20 bp, Artificial
  20-mer unique DNA sequence
atctcgccacacacccgtca

SEQ ID NO: 9025 - DNA, 20 bp, Artificial
  20-mer unique DNA sequence
ctaaaaccccccgcaccacg

SEQ ID NO: 9026 - DNA, 20 bp, Artificial
  20-mer unique DNA sequence
tgaacggctcatgccgcact

SEQ ID NO: 9027 - DNA, 20 bp, Artificial
  20-mer unique DNA sequence
acctcccgctagatgtgcga

SEQ ID NO: 9028 - DNA, 20 bp, Artificial
  20-mer unique DNA sequence
gctcgtggggaaggcgcatt

SEQ ID NO: 9029 - DNA, 20 bp, Artificial
  20-mer unique DNA sequence
ttgcgatgtcctgccgtgtt

SEQ ID NO: 9030 - DNA, 20 bp, Artificial
  20-mer unique DNA sequence
ctttcacaggcgagcgagca

SEQ ID NO: 9031 - DNA, 20 bp, Artificial
  20-mer unique DNA sequence
gcgggaggtgcggatgagaa

SEQ ID NO: 9032 - DNA, 20 bp, Artificial
  20-mer unique DNA sequence
atgccaacgaggacgggtgt

SEQ ID NO: 9033 - DNA, 20 bp, Artificial
  20-mer unique DNA sequence
cggcagggtgggcacagaag

SEQ ID NO: 9034 - DNA, 20 bp, Artificial
  20-mer unique DNA sequence
ccccgcttatcccattgccc

SEQ ID NO: 9035 - DNA, 20 bp, Artificial
  20-mer unique DNA sequence
ttcccctgccctgattgacc

SEQ ID NO: 9036 - DNA, 20 bp, Artificial
  20-mer unique DNA sequence
atcatgcgggacgaggcgac

SEQ ID NO: 9037 - DNA, 20 bp, Artificial
  20-mer unique DNA sequence
cctgtgcatgccccaacgtc

SEQ ID NO: 9038 - DNA, 20 bp, Artificial
  20-mer unique DNA sequence
tctgttcgaggtggagcccc

SEQ ID NO: 9039 - DNA, 20 bp, Artificial
  20-mer unique DNA sequence
ttcgttgccgctcgtggtga

SEQ ID NO: 9040 - DNA, 20 bp, Artificial
  20-mer unique DNA sequence
caagccctagcaactcccgc

SEQ ID NO: 9041 - DNA, 20 bp, Artificial
  20-mer unique DNA sequence
ccggagcgaaagaaaggtgc

SEQ ID NO: 9042 - DNA, 20 bp, Artificial
  20-mer unique DNA sequence
atctgtcggtgggttggcga

SEQ ID NO: 9043 - DNA, 20 bp, Artificial
  20-mer unique DNA sequence
agggggcatagggacagcgg

SEQ ID NO: 9044 - DNA, 20 bp, Artificial
  20-mer unique DNA sequence
cggccccatggataagctgc

SEQ ID NO: 9045 - DNA, 20 bp, Artificial
  20-mer unique DNA sequence
gctctctcccaatcaccggc

SEQ ID NO: 9046 - DNA, 20 bp, Artificial
  20-mer unique DNA sequence
tcgtcgttgcgtcctcctcc

SEQ ID NO: 9047 - DNA, 20 bp, Artificial
  20-mer unique DNA sequence
agaagccctgatgcccaacg

SEQ ID NO: 9048 - DNA, 20 bp, Artificial
  20-mer unique DNA sequence
ggtggccggggaatggtgat

SEQ ID NO: 9049 - DNA, 20 bp, Artificial
  20-mer unique DNA sequence
gcggtttcagccattccaca

SEQ ID NO: 9050 - DNA, 20 bp, Artificial
  20-mer unique DNA sequence
tttaggtgtcgcgggtagga

SEQ ID NO: 9051 - DNA, 20 bp, Artificial
  20-mer unique DNA sequence
tcgcgatctcgcggcaacta

SEQ ID NO: 9052 - DNA, 20 bp, Artificial
  20-mer unique DNA sequence
caaatcatggcaacggacgg

SEQ ID NO: 9053 - DNA, 20 bp, Artificial
  20-mer unique DNA sequence
atggccaagcaagtccggaa

SEQ ID NO: 9054 - DNA, 20 bp, Artificial
  20-mer unique DNA sequence
ctcactcacagcaaccgggc

SEQ ID NO: 9055 - DNA, 20 bp, Artificial
  20-mer unique DNA sequence
gttcatacgggggcggaggg

SEQ ID NO: 9056 - DNA, 20 bp, Artificial
  20-mer unique DNA sequence
tccatccatcacccagcccg

SEQ ID NO: 9057 - DNA, 20 bp, Artificial
  20-mer unique DNA sequence
tttccctgcttgctcccgtg

SEQ ID NO: 9058 - DNA, 20 bp, Artificial
  20-mer unique DNA sequence
cttagaccgctgccttccgc

SEQ ID NO: 9059 - DNA, 20 bp, Artificial
  20-mer unique DNA sequence
tgacttaggacccgcgcgtg

SEQ ID NO: 9060 - DNA, 20 bp, Artificial
  20-mer unique DNA sequence
cctcgccgtcgtcctcaacc

SEQ ID NO: 9061 - DNA, 20 bp, Artificial
  20-mer unique DNA sequence
gtcctttcccacctcggcct

SEQ ID NO: 9062 - DNA, 20 bp, Artificial
  20-mer unique DNA sequence
ccgcacgaacaaccccaaca

SEQ ID NO: 9063 - DNA, 20 bp, Artificial
  20-mer unique DNA sequence
tgaccgggtctagcttccgt

SEQ ID NO: 9064 - DNA, 20 bp, Artificial
  20-mer unique DNA sequence
atccgacgcccacaactccg

SEQ ID NO: 9065 - DNA, 20 bp, Artificial
  20-mer unique DNA sequence
ggaagggggtatgggcgtgt

SEQ ID NO: 9066 - DNA, 20 bp, Artificial
  20-mer unique DNA sequence
ggcagcaagggctacaagcg

SEQ ID NO: 9067 - DNA, 20 bp, Artificial
  20-mer unique DNA sequence
cccaaagcccccgaagaaag

SEQ ID NO: 9068 - DNA, 20 bp, Artificial
  20-mer unique DNA sequence
ccatcatgcggcgtcgatga

SEQ ID NO: 9069 - DNA, 20 bp, Artificial
  20-mer unique DNA sequence
tgctgagctgcgctgtacaa

SEQ ID NO: 9070 - DNA, 20 bp, Artificial
  20-mer unique DNA sequence
tcaacacgcaatagggggcc

SEQ ID NO: 9071 - DNA, 20 bp, Artificial
  20-mer unique DNA sequence
ctggggccgttgctggattt

SEQ ID NO: 9072 - DNA, 20 bp, Artificial
  20-mer unique DNA sequence
cgccggcaacgctacattaa

SEQ ID NO: 9073 - DNA, 20 bp, Artificial
  20-mer unique DNA sequence
tgttgcgctgtgggacctcg

SEQ ID NO: 9074 - DNA, 20 bp, Artificial
  20-mer unique DNA sequence
tcgcttttcgcctacccccc

SEQ ID NO: 9075 - DNA, 20 bp, Artificial
  20-mer unique DNA sequence
tggaacaaaggcgggagccc

SEQ ID NO: 9076 - DNA, 20 bp, Artificial
  20-mer unique DNA sequence
ggtccagcgtcgtttccagg

SEQ ID NO: 9077 - DNA, 20 bp, Artificial
  20-mer unique DNA sequence
ctgttagatggcgccggcga

SEQ ID NO: 9078 - DNA, 20 bp, Artificial
  20-mer unique DNA sequence
ctttcggggggcattcttga

SEQ ID NO: 9079 - DNA, 20 bp, Artificial
  20-mer unique DNA sequence
ttgagccttggacgggtgtg

SEQ ID NO: 9080 - DNA, 20 bp, Artificial
  20-mer unique DNA sequence
ccacttatctggaacgcgcc

SEQ ID NO: 9081 - DNA, 20 bp, Artificial
  20-mer unique DNA sequence
acccgtaccccccctgtccc

SEQ ID NO: 9082 - DNA, 20 bp, Artificial
  20-mer unique DNA sequence
gccagaggacaggggagcaa

SEQ ID NO: 9083 - DNA, 20 bp, Artificial
  20-mer unique DNA sequence
ttttcgggttcgggtccagg

SEQ ID NO: 9084 - DNA, 20 bp, Artificial
  20-mer unique DNA sequence
tgtgataacccaaagcgcgc

SEQ ID NO: 9085 - DNA, 20 bp, Artificial
  20-mer unique DNA sequence
ccgattgtggcgctttgctg

SEQ ID NO: 9086 - DNA, 20 bp, Artificial
  20-mer unique DNA sequence
gtggcgtcgggcaagttgag

SEQ ID NO: 9087 - DNA, 20 bp, Artificial
  20-mer unique DNA sequence
cggcggagcggtgttaccaa

SEQ ID NO: 9088 - DNA, 20 bp, Artificial
  20-mer unique DNA sequence
ttcgctcgctccttgccctc

SEQ ID NO: 9089 - DNA, 20 bp, Artificial
  20-mer unique DNA sequence
ggcggagtgtgggaaatgct

SEQ ID NO: 9090 - DNA, 20 bp, Artificial
  20-mer unique DNA sequence
cccacccctccacttctcga

SEQ ID NO: 9091 - DNA, 20 bp, Artificial
  20-mer unique DNA sequence
cctcgcctgaacctaccccg

SEQ ID NO: 9092 - DNA, 20 bp, Artificial
  20-mer unique DNA sequence
accgacgtgattcgccagac

SEQ ID NO: 9093 - DNA, 20 bp, Artificial
  20-mer unique DNA sequence
aaactcacgcgctggcacta

SEQ ID NO: 9094 - DNA, 20 bp, Artificial
  20-mer unique DNA sequence
ccccgcgctccaattatgtt

SEQ ID NO: 9095 - DNA, 20 bp, Artificial
  20-mer unique DNA sequence
tccggtccttcgctctgcca

SEQ ID NO: 9096 - DNA, 20 bp, Artificial
  20-mer unique DNA sequence
tgcagtgcgctacgctacaa

SEQ ID NO: 9097 - DNA, 20 bp, Artificial
  20-mer unique DNA sequence
ggcgggatcacggaaaagag

SEQ ID NO: 9098 - DNA, 20 bp, Artificial
  20-mer unique DNA sequence
aggcagatcgggcggagagt

SEQ ID NO: 9099 - DNA, 20 bp, Artificial
  20-mer unique DNA sequence
taattcaccccccttcccgg

SEQ ID NO: 9100 - DNA, 20 bp, Artificial
  20-mer unique DNA sequence
gacgcgggcacaatttccaa

SEQ ID NO: 9101 - DNA, 20 bp, Artificial
  20-mer unique DNA sequence
actttgtcgaaggccggggc

SEQ ID NO: 9102 - DNA, 20 bp, Artificial
  20-mer unique DNA sequence
ttgaacccacccactgaccg

SEQ ID NO: 9103 - DNA, 20 bp, Artificial
  20-mer unique DNA sequence
gtttcccgatgttgccctgc

SEQ ID NO: 9104 - DNA, 20 bp, Artificial
  20-mer unique DNA sequence
cccaaccgcagagcaagcaa

SEQ ID NO: 9105 - DNA, 20 bp, Artificial
  20-mer unique DNA sequence
ggtgcgatgggaggactgaa

SEQ ID NO: 9106 - DNA, 20 bp, Artificial
  20-mer unique DNA sequence
acctctgagagccgtgccaa

SEQ ID NO: 9107 - DNA, 20 bp, Artificial
  20-mer unique DNA sequence
tagccacgtacctcaccgga

SEQ ID NO: 9108 - DNA, 20 bp, Artificial
  20-mer unique DNA sequence
cggcgccaaaagcaacctat

SEQ ID NO: 9109 - DNA, 20 bp, Artificial
  20-mer unique DNA sequence
gttggctcggttggcggatg

SEQ ID NO: 9110 - DNA, 20 bp, Artificial
  20-mer unique DNA sequence
tgtcatgatcgcccgaaaaa

SEQ ID NO: 9111 - DNA, 20 bp, Artificial
  20-mer unique DNA sequence
agggaagaagcgaccaccga

SEQ ID NO: 9112 - DNA, 20 bp, Artificial
  20-mer unique DNA sequence
gtgcgaggagaacagtggcg

SEQ ID NO: 9113 - DNA, 20 bp, Artificial
  20-mer unique DNA sequence
cccgacgacaaacacctgcc

SEQ ID NO: 9114 - DNA, 20 bp, Artificial
  20-mer unique DNA sequence
ggcgctcaaaggtatccccc

SEQ ID NO: 9115 - DNA, 20 bp, Artificial
  20-mer unique DNA sequence
cagggaccacggcatagcga

SEQ ID NO: 9116 - DNA, 20 bp, Artificial
  20-mer unique DNA sequence
cgccctctaccctgcttccc

SEQ ID NO: 9117 - DNA, 20 bp, Artificial
  20-mer unique DNA sequence
gttgcgaggagatggagcgt

SEQ ID NO: 9118 - DNA, 20 bp, Artificial
  20-mer unique DNA sequence
atgggcggccacctgactaa

SEQ ID NO: 9119 - DNA, 20 bp, Artificial
  20-mer unique DNA sequence
tggctatctgacgctctgcg

SEQ ID NO: 9120 - DNA, 20 bp, Artificial
  20-mer unique DNA sequence
acacccaaccgcgacctgat

SEQ ID NO: 9121 - DNA, 20 bp, Artificial
  20-mer unique DNA sequence
gcttttggggaggttcggtg

SEQ ID NO: 9122 - DNA, 20 bp, Artificial
  20-mer unique DNA sequence
gggagcacacgaaaacgcca

SEQ ID NO: 9123 - DNA, 20 bp, Artificial
  20-mer unique DNA sequence
gtagcgggggacgagtggac

SEQ ID NO: 9124 - DNA, 20 bp, Artificial
  20-mer unique DNA sequence
gaggacggtggggggctatc

SEQ ID NO: 9125 - DNA, 20 bp, Artificial
  20-mer unique DNA sequence
cccggcgtcctgttccatgt

SEQ ID NO: 9126 - DNA, 20 bp, Artificial
  20-mer unique DNA sequence
gcccgctaacgtccgatcaa

SEQ ID NO: 9127 - DNA, 20 bp, Artificial
  20-mer unique DNA sequence
cgccctctctgcctccacac

SEQ ID NO: 9128 - DNA, 20 bp, Artificial
  20-mer unique DNA sequence
atttgcaggcgccgggtaca

SEQ ID NO: 9129 - DNA, 20 bp, Artificial
  20-mer unique DNA sequence
ccttctgacccatcgccgga

SEQ ID NO: 9130 - DNA, 20 bp, Artificial
  20-mer unique DNA sequence
cggcacctcaagcgaaaatg

SEQ ID NO: 9131 - DNA, 20 bp, Artificial
  20-mer unique DNA sequence
ctggggggtttggggcatct

SEQ ID NO: 9132 - DNA, 20 bp, Artificial
  20-mer unique DNA sequence
acttgggatcggtgctcggc

SEQ ID NO: 9133 - DNA, 20 bp, Artificial
  20-mer unique DNA sequence
aagccctccgaaaccccacg

SEQ ID NO: 9134 - DNA, 20 bp, Artificial
  20-mer unique DNA sequence
ccgtggtgccgggatactcg

SEQ ID NO: 9135 - DNA, 20 bp, Artificial
  20-mer unique DNA sequence
tatcgggcgacgaacggttt

SEQ ID NO: 9136 - DNA, 20 bp, Artificial
  20-mer unique DNA sequence
ccgaggaattatggggcgct

SEQ ID NO: 9137 - DNA, 20 bp, Artificial
  20-mer unique DNA sequence
cgggggaactacatggcgca

SEQ ID NO: 9138 - DNA, 20 bp, Artificial
  20-mer unique DNA sequence
tccgcgcctctcaactgtca

SEQ ID NO: 9139 - DNA, 20 bp, Artificial
  20-mer unique DNA sequence
tcgccctcccccgttctaca

SEQ ID NO: 9140 - DNA, 20 bp, Artificial
  20-mer unique DNA sequence
cctaccccaagcccaacgtg

SEQ ID NO: 9141 - DNA, 20 bp, Artificial
  20-mer unique DNA sequence
caagatggaatggcccgcgt

SEQ ID NO: 9142 - DNA, 20 bp, Artificial
  20-mer unique DNA sequence
tccgtacgcgctgggtacaa

SEQ ID NO: 9143 - DNA, 20 bp, Artificial
  20-mer unique DNA sequence
tataccgcgctggcgtacaa

SEQ ID NO: 9144 - DNA, 20 bp, Artificial
  20-mer unique DNA sequence
tcgcgcctcacccttctcat

SEQ ID NO: 9145 - DNA, 20 bp, Artificial
  20-mer unique DNA sequence
ggcaacagcggagcaaggac

SEQ ID NO: 9146 - DNA, 20 bp, Artificial
  20-mer unique DNA sequence
gcaggaatcatcggccggta

SEQ ID NO: 9147 - DNA, 20 bp, Artificial
  20-mer unique DNA sequence
tctcgaattgatggcgctgg

SEQ ID NO: 9148 - DNA, 20 bp, Artificial
  20-mer unique DNA sequence
aacacgcctgatccaccgcc

SEQ ID NO: 9149 - DNA, 20 bp, Artificial
  20-mer unique DNA sequence
ccggtaggggcaaatcgagc

SEQ ID NO: 9150 - DNA, 20 bp, Artificial
  20-mer unique DNA sequence
tgaaggtcctacgcgcaacg

SEQ ID NO: 9151 - DNA, 20 bp, Artificial
  20-mer unique DNA sequence
gttcaccgtgtgacccctga

SEQ ID NO: 9152 - DNA, 20 bp, Artificial
  20-mer unique DNA sequence
cgacccgccacaaacaccag

SEQ ID NO: 9153 - DNA, 20 bp, Artificial
  20-mer unique DNA sequence
tccttaccgagccacccccg

SEQ ID NO: 9154 - DNA, 20 bp, Artificial
  20-mer unique DNA sequence
tcgatgcccacaacaaagcc

SEQ ID NO: 9155 - DNA, 20 bp, Artificial
  20-mer unique DNA sequence
ataggtttcctctgtgcgcg

SEQ ID NO: 9156 - DNA, 20 bp, Artificial
  20-mer unique DNA sequence
ccagggagcgaccccagtaa

SEQ ID NO: 9157 - DNA, 20 bp, Artificial
  20-mer unique DNA sequence
tccgcaagtgacatccgctc

SEQ ID NO: 9158 - DNA, 20 bp, Artificial
  20-mer unique DNA sequence
tctggggaaaacgcgctgga

SEQ ID NO: 9159 - DNA, 20 bp, Artificial
  20-mer unique DNA sequence
gcccggacgaagcatgaaac

SEQ ID NO: 9160 - DNA, 20 bp, Artificial
  20-mer unique DNA sequence
cgactcccggacccaaaggc

SEQ ID NO: 9161 - DNA, 20 bp, Artificial
  20-mer unique DNA sequence
ttcggcgctaaatccgcttc

SEQ ID NO: 9162 - DNA, 20 bp, Artificial
  20-mer unique DNA sequence
ttttgacgccctcgctctgg

SEQ ID NO: 9163 - DNA, 20 bp, Artificial
  20-mer unique DNA sequence
tcgtggatgggagagatgcg

SEQ ID NO: 9164 - DNA, 20 bp, Artificial
  20-mer unique DNA sequence
acgccagacccatacacgca

SEQ ID NO: 9165 - DNA, 20 bp, Artificial
  20-mer unique DNA sequence
cgctttcgctcgtccgttcg

SEQ ID NO: 9166 - DNA, 20 bp, Artificial
  20-mer unique DNA sequence
ccgagaaggatggcgctagc

SEQ ID NO: 9167 - DNA, 20 bp, Artificial
  20-mer unique DNA sequence
tttccttcggccttttgcgc

SEQ ID NO: 9168 - DNA, 20 bp, Artificial
  20-mer unique DNA sequence
agcggggtaggcaattcgga

SEQ ID NO: 9169 - DNA, 20 bp, Artificial
  20-mer unique DNA sequence
cgccgaccgacaaaagcaag

SEQ ID NO: 9170 - DNA, 20 bp, Artificial
  20-mer unique DNA sequence
tccctctcccgccccttagt

SEQ ID NO: 9171 - DNA, 20 bp, Artificial
  20-mer unique DNA sequence
agagggaatgatgcggatgg

SEQ ID NO: 9172 - DNA, 20 bp, Artificial
  20-mer unique DNA sequence
agccccgcagaaatgctcag

SEQ ID NO: 9173 - DNA, 20 bp, Artificial
  20-mer unique DNA sequence
cgcaccctgcaaatcgatga

SEQ ID NO: 9174 - DNA, 20 bp, Artificial
  20-mer unique DNA sequence
tcgctaacaggggggccaaa

SEQ ID NO: 9175 - DNA, 20 bp, Artificial
  20-mer unique DNA sequence
catagccgccaggcaaccaa

SEQ ID NO: 9176 - DNA, 20 bp, Artificial
  20-mer unique DNA sequence
cttggcgtcgaggggtcttg

SEQ ID NO: 9177 - DNA, 20 bp, Artificial
  20-mer unique DNA sequence
cccgtttgatgaccctgcgt

SEQ ID NO: 9178 - DNA, 20 bp, Artificial
  20-mer unique DNA sequence
cggttgacgagggggattgc

SEQ ID NO: 9179 - DNA, 20 bp, Artificial
  20-mer unique DNA sequence
cgtggatggggggaaaacga

SEQ ID NO: 9180 - DNA, 20 bp, Artificial
  20-mer unique DNA sequence
actcgggtgggtactggcgc

SEQ ID NO: 9181 - DNA, 20 bp, Artificial
  20-mer unique DNA sequence
ctgcttgtgcccctctcccg

SEQ ID NO: 9182 - DNA, 20 bp, Artificial
  20-mer unique DNA sequence
ccaagcaaagggcgcaacac

SEQ ID NO: 9183 - DNA, 20 bp, Artificial
  20-mer unique DNA sequence
accgagcataggacctgacg

SEQ ID NO: 9184 - DNA, 20 bp, Artificial
  20-mer unique DNA sequence
cctcctagccgcaacaccca

SEQ ID NO: 9185 - DNA, 20 bp, Artificial
  20-mer unique DNA sequence
cgcctaaacccgcacagcac

SEQ ID NO: 9186 - DNA, 20 bp, Artificial
  20-mer unique DNA sequence
aatatgcggggcggtggaaa

SEQ ID NO: 9187 - DNA, 20 bp, Artificial
  20-mer unique DNA sequence
ccgcgcttggtcttcttcga

SEQ ID NO: 9188 - DNA, 20 bp, Artificial
  20-mer unique DNA sequence
ggcgaggtgcaatgggtgag

SEQ ID NO: 9189 - DNA, 20 bp, Artificial
  20-mer unique DNA sequence
ccgccagtatgaccgaccct

SEQ ID NO: 9190 - DNA, 20 bp, Artificial
  20-mer unique DNA sequence
ctgcgtggctgaatggatgc

SEQ ID NO: 9191 - DNA, 20 bp, Artificial
  20-mer unique DNA sequence
gagaaccgcgctgcacaaac

SEQ ID NO: 9192 - DNA, 20 bp, Artificial
  20-mer unique DNA sequence
tgcggcgtagggttaagggc

SEQ ID NO: 9193 - DNA, 20 bp, Artificial
  20-mer unique DNA sequence
ccgctcccacatcctgccaa

SEQ ID NO: 9194 - DNA, 20 bp, Artificial
  20-mer unique DNA sequence
aggatacgctagtcgcctgc

SEQ ID NO: 9195 - DNA, 20 bp, Artificial
  20-mer unique DNA sequence
agcacgactcctaggtcgca

SEQ ID NO: 9196 - DNA, 20 bp, Artificial
  20-mer unique DNA sequence
atggtcacggcccaaaacgg

SEQ ID NO: 9197 - DNA, 20 bp, Artificial
  20-mer unique DNA sequence
tgaggcgaggtgatgcggat

SEQ ID NO: 9198 - DNA, 20 bp, Artificial
  20-mer unique DNA sequence
gcagacggcctaagtggggg

SEQ ID NO: 9199 - DNA, 20 bp, Artificial
  20-mer unique DNA sequence
gaaaacgtcaagcccccagc

SEQ ID NO: 9200 - DNA, 20 bp, Artificial
  20-mer unique DNA sequence
tccccaaattccccccgtga

SEQ ID NO: 9201 - DNA, 20 bp, Artificial
  20-mer unique DNA sequence
cttcgccgtggtgggctctg

SEQ ID NO: 9202 - DNA, 20 bp, Artificial
  20-mer unique DNA sequence
cgcagtcaaaccaccacgct

SEQ ID NO: 9203 - DNA, 20 bp, Artificial
  20-mer unique DNA sequence
tttgggctctgtgtgcgggg

SEQ ID NO: 9204 - DNA, 20 bp, Artificial
  20-mer unique DNA sequence
agcagacgttgtaacgccga

SEQ ID NO: 9205 - DNA, 20 bp, Artificial
  20-mer unique DNA sequence
tgacgccacaggtgatcgag

SEQ ID NO: 9206 - DNA, 20 bp, Artificial
  20-mer unique DNA sequence
agcgcgcggggtgtatgtat

SEQ ID NO: 9207 - DNA, 20 bp, Artificial
  20-mer unique DNA sequence
cgatcatggtagcggggagg

SEQ ID NO: 9208 - DNA, 20 bp, Artificial
  20-mer unique DNA sequence
tgtgatgcgcgctgcaatga

SEQ ID NO: 9209 - DNA, 20 bp, Artificial
  20-mer unique DNA sequence
gattcccgcataggcacgga

SEQ ID NO: 9210 - DNA, 20 bp, Artificial
  20-mer unique DNA sequence
atggattgcgcagaaggcgt

SEQ ID NO: 9211 - DNA, 20 bp, Artificial
  20-mer unique DNA sequence
ccctttgacccgttcccgtc

SEQ ID NO: 9212 - DNA, 20 bp, Artificial
  20-mer unique DNA sequence
gcaacgatcgacccaagcct

SEQ ID NO: 9213 - DNA, 20 bp, Artificial
  20-mer unique DNA sequence
gccgctagccattcgacctt

SEQ ID NO: 9214 - DNA, 20 bp, Artificial
  20-mer unique DNA sequence
acccggaacaactggccact

SEQ ID NO: 9215 - DNA, 20 bp, Artificial
  20-mer unique DNA sequence
aggcactaacgcagaccggc

SEQ ID NO: 9216 - DNA, 20 bp, Artificial
  20-mer unique DNA sequence
accgtgctcctgctttgccc

SEQ ID NO: 9217 - DNA, 20 bp, Artificial
  20-mer unique DNA sequence
ttgtcccggaacacgctgta

SEQ ID NO: 9218 - DNA, 20 bp, Artificial
  20-mer unique DNA sequence
agggccgggtggtattaggg

SEQ ID NO: 9219 - DNA, 20 bp, Artificial
  20-mer unique DNA sequence
gatgtgcttcagagggcgcc

SEQ ID NO: 9220 - DNA, 20 bp, Artificial
  20-mer unique DNA sequence
tgcggtcctacggtgattcg

SEQ ID NO: 9221 - DNA, 20 bp, Artificial
  20-mer unique DNA sequence
atggcgctccggtacgacta

SEQ ID NO: 9222 - DNA, 20 bp, Artificial
  20-mer unique DNA sequence
ttacaatgcgcgggtcgctt

SEQ ID NO: 9223 - DNA, 20 bp, Artificial
  20-mer unique DNA sequence
gcacgcatgccctacgtgaa

SEQ ID NO: 9224 - DNA, 20 bp, Artificial
  20-mer unique DNA sequence
tcccaaaaggcacccccaac

SEQ ID NO: 9225 - DNA, 20 bp, Artificial
  20-mer unique DNA sequence
tatcgcggtattcgggcagg

SEQ ID NO: 9226 - DNA, 20 bp, Artificial
  20-mer unique DNA sequence
agggcacgggtagaaggcgt

SEQ ID NO: 9227 - DNA, 20 bp, Artificial
  20-mer unique DNA sequence
aggtgaacgaagggcgggtt

SEQ ID NO: 9228 - DNA, 20 bp, Artificial
  20-mer unique DNA sequence
ctcctcccgtcgccggctta

SEQ ID NO: 9229 - DNA, 20 bp, Artificial
  20-mer unique DNA sequence
gcgtccgcacctgctgctaa

SEQ ID NO: 9230 - DNA, 20 bp, Artificial
  20-mer unique DNA sequence
cgggggcaggttcagggtag

SEQ ID NO: 9231 - DNA, 20 bp, Artificial
  20-mer unique DNA sequence
cccattctaccgcgccaagc

SEQ ID NO: 9232 - DNA, 20 bp, Artificial
  20-mer unique DNA sequence
aaaatacccccgtgcgtcgc

SEQ ID NO: 9233 - DNA, 20 bp, Artificial
  20-mer unique DNA sequence
ttcttcatgcctgcccacca

SEQ ID NO: 9234 - DNA, 20 bp, Artificial
  20-mer unique DNA sequence
gggtggtaaggggggagggc

SEQ ID NO: 9235 - DNA, 20 bp, Artificial
  20-mer unique DNA sequence
cccgcgcaaagaaagtaccc

SEQ ID NO: 9236 - DNA, 20 bp, Artificial
  20-mer unique DNA sequence
acggagcgaaatgaagcgcc

SEQ ID NO: 9237 - DNA, 20 bp, Artificial
  20-mer unique DNA sequence
ccgggggtttagctggcgag

SEQ ID NO: 9238 - DNA, 20 bp, Artificial
  20-mer unique DNA sequence
aacgctgggggatttgtggc

SEQ ID NO: 9239 - DNA, 20 bp, Artificial
  20-mer unique DNA sequence
cggaggggtcacgaaagacg

SEQ ID NO: 9240 - DNA, 20 bp, Artificial
  20-mer unique DNA sequence
tccgggtggggtgctatgat

SEQ ID NO: 9241 - DNA, 20 bp, Artificial
  20-mer unique DNA sequence
tttccgatagccgagtgccc

SEQ ID NO: 9242 - DNA, 20 bp, Artificial
  20-mer unique DNA sequence
aataccaaacatgcgccccg

SEQ ID NO: 9243 - DNA, 20 bp, Artificial
  20-mer unique DNA sequence
gcagggaggggcgaaggttg

SEQ ID NO: 9244 - DNA, 20 bp, Artificial
  20-mer unique DNA sequence
tcagtcgggggatttgggtc

SEQ ID NO: 9245 - DNA, 20 bp, Artificial
  20-mer unique DNA sequence
tatccatcacaccgccctgc

SEQ ID NO: 9246 - DNA, 20 bp, Artificial
  20-mer unique DNA sequence
ggctggtcaaaagtgggggg

SEQ ID NO: 9247 - DNA, 20 bp, Artificial
  20-mer unique DNA sequence
actccgcccccatctgaccg

SEQ ID NO: 9248 - DNA, 20 bp, Artificial
  20-mer unique DNA sequence
tgtaccgacccttgaccccc

SEQ ID NO: 9249 - DNA, 20 bp, Artificial
  20-mer unique DNA sequence
gggaggcgtaacatgggcaa

SEQ ID NO: 9250 - DNA, 20 bp, Artificial
  20-mer unique DNA sequence
tgcctcctcctgcccgaatg

SEQ ID NO: 9251 - DNA, 20 bp, Artificial
  20-mer unique DNA sequence
tgcctattcgccgctcactg

SEQ ID NO: 9252 - DNA, 20 bp, Artificial
  20-mer unique DNA sequence
aacaggcggacgggcataag

SEQ ID NO: 9253 - DNA, 20 bp, Artificial
  20-mer unique DNA sequence
gtgggggcagggcgttgtct

SEQ ID NO: 9254 - DNA, 20 bp, Artificial
  20-mer unique DNA sequence
agcagaaaccacgccaacga

SEQ ID NO: 9255 - DNA, 20 bp, Artificial
  20-mer unique DNA sequence
atggaggagggtggactgcg

SEQ ID NO: 9256 - DNA, 20 bp, Artificial
  20-mer unique DNA sequence
caccacctgcccgacgacct

SEQ ID NO: 9257 - DNA, 20 bp, Artificial
  20-mer unique DNA sequence
ccaacgcctgctccattctg

SEQ ID NO: 9258 - DNA, 20 bp, Artificial
  20-mer unique DNA sequence
cacggagatgcgaaaccagc

SEQ ID NO: 9259 - DNA, 20 bp, Artificial
  20-mer unique DNA sequence
gtgccctgcgctcattcaga

SEQ ID NO: 9260 - DNA, 20 bp, Artificial
  20-mer unique DNA sequence
cgcacaaacagaccggccac

SEQ ID NO: 9261 - DNA, 20 bp, Artificial
  20-mer unique DNA sequence
atggcgtcgtttggcttgtg

SEQ ID NO: 9262 - DNA, 20 bp, Artificial
  20-mer unique DNA sequence
taggtgctttggcggagggt

SEQ ID NO: 9263 - DNA, 20 bp, Artificial
  20-mer unique DNA sequence
gactggggcggtgctttgtc

SEQ ID NO: 9264 - DNA, 20 bp, Artificial
  20-mer unique DNA sequence
tgctttgccgttgtccccag

SEQ ID NO: 9265 - DNA, 20 bp, Artificial
  20-mer unique DNA sequence
tgcgagaagcgagggcggta

SEQ ID NO: 9266 - DNA, 20 bp, Artificial
  20-mer unique DNA sequence
ccactcttttcccaccccgc

SEQ ID NO: 9267 - DNA, 20 bp, Artificial
  20-mer unique DNA sequence
caagcagctcggagaccgtt

SEQ ID NO: 9268 - DNA, 20 bp, Artificial
  20-mer unique DNA sequence
gcgccccctccctgacacat

SEQ ID NO: 9269 - DNA, 20 bp, Artificial
  20-mer unique DNA sequence
ttcgtttatgtcgcccgcct

SEQ ID NO: 9270 - DNA, 20 bp, Artificial
  20-mer unique DNA sequence
tgtgggtacggtgcggaagg

SEQ ID NO: 9271 - DNA, 20 bp, Artificial
  20-mer unique DNA sequence
gtgatacggcagcggggaat

SEQ ID NO: 9272 - DNA, 20 bp, Artificial
  20-mer unique DNA sequence
ccccctgcgaatgccttaaa

SEQ ID NO: 9273 - DNA, 20 bp, Artificial
  20-mer unique DNA sequence
gttttccccgcgtttaggcc

SEQ ID NO: 9274 - DNA, 20 bp, Artificial
  20-mer unique DNA sequence
attctctgggctgggcgtgg

SEQ ID NO: 9275 - DNA, 20 bp, Artificial
  20-mer unique DNA sequence
cggaacggcagacaggacgg

SEQ ID NO: 9276 - DNA, 20 bp, Artificial
  20-mer unique DNA sequence
acaacgacccctgccttccg

SEQ ID NO: 9277 - DNA, 20 bp, Artificial
  20-mer unique DNA sequence
gaaggcaggggtggaggcac

SEQ ID NO: 9278 - DNA, 20 bp, Artificial
  20-mer unique DNA sequence
tgtccccgtaaccacgctca

SEQ ID NO: 9279 - DNA, 20 bp, Artificial
  20-mer unique DNA sequence
ccgtccacctccgttccgct

SEQ ID NO: 9280 - DNA, 20 bp, Artificial
  20-mer unique DNA sequence
agggagggaaccaaacggga

SEQ ID NO: 9281 - DNA, 20 bp, Artificial
  20-mer unique DNA sequence
gcaatgggggggtcgtgagg

SEQ ID NO: 9282 - DNA, 20 bp, Artificial
  20-mer unique DNA sequence
caaccccaccgaaaatccgc

SEQ ID NO: 9283 - DNA, 20 bp, Artificial
  20-mer unique DNA sequence
ggaagacggggggtgcgaat

SEQ ID NO: 9284 - DNA, 20 bp, Artificial
  20-mer unique DNA sequence
cgaagcacccagcccaatca

SEQ ID NO: 9285 - DNA, 20 bp, Artificial
  20-mer unique DNA sequence
caacgattcatgagcgcggc

SEQ ID NO: 9286 - DNA, 20 bp, Artificial
  20-mer unique DNA sequence
tgggggggtaggtgacgaga

SEQ ID NO: 9287 - DNA, 20 bp, Artificial
  20-mer unique DNA sequence
caaggctaggcgctcacgat

SEQ ID NO: 9288 - DNA, 20 bp, Artificial
  20-mer unique DNA sequence
ccggagtacggctgctacaa

SEQ ID NO: 9289 - DNA, 20 bp, Artificial
  20-mer unique DNA sequence
aaggccagtcggctgttaca

SEQ ID NO: 9290 - DNA, 20 bp, Artificial
  20-mer unique DNA sequence
tgtcgcgatggccgataaca

SEQ ID NO: 9291 - DNA, 20 bp, Artificial
  20-mer unique DNA sequence
tgtcggctaccgggtcaaca

SEQ ID NO: 9292 - DNA, 20 bp, Artificial
  20-mer unique DNA sequence
ctcgccccacctacccggac

SEQ ID NO: 9293 - DNA, 20 bp, Artificial
  20-mer unique DNA sequence
ccatttcattagcggggggc

SEQ ID NO: 9294 - DNA, 20 bp, Artificial
  20-mer unique DNA sequence
gcgtaaaaggtgcgagccgt

SEQ ID NO: 9295 - DNA, 20 bp, Artificial
  20-mer unique DNA sequence
aagacccgcgcggataacag

SEQ ID NO: 9296 - DNA, 20 bp, Artificial
  20-mer unique DNA sequence
agcaagccaaagccgggaga

SEQ ID NO: 9297 - DNA, 20 bp, Artificial
  20-mer unique DNA sequence
gacgggaaggagcgaggagg

SEQ ID NO: 9298 - DNA, 20 bp, Artificial
  20-mer unique DNA sequence
gaattccggtcccttgccct

SEQ ID NO: 9299 - DNA, 20 bp, Artificial
  20-mer unique DNA sequence
gagggataaggcgcgagcag

SEQ ID NO: 9300 - DNA, 20 bp, Artificial
  20-mer unique DNA sequence
cttggaacatgtcggcgcaa

SEQ ID NO: 9301 - DNA, 20 bp, Artificial
  20-mer unique DNA sequence
atgcacggctgcgcatacaa

SEQ ID NO: 9302 - DNA, 20 bp, Artificial
  20-mer unique DNA sequence
ggattgggagctgggaggag

SEQ ID NO: 9303 - DNA, 20 bp, Artificial
  20-mer unique DNA sequence
agtgttgacgtagagcggcg

SEQ ID NO: 9304 - DNA, 20 bp, Artificial
  20-mer unique DNA sequence
tgaatgttgggctgcggggt

SEQ ID NO: 9305 - DNA, 20 bp, Artificial
  20-mer unique DNA sequence
ccacctctttggtccctcgc

SEQ ID NO: 9306 - DNA, 20 bp, Artificial
  20-mer unique DNA sequence
ttcggggtcgtagggttcca

SEQ ID NO: 9307 - DNA, 20 bp, Artificial
  20-mer unique DNA sequence
tatgatgacaccggcctgcg

SEQ ID NO: 9308 - DNA, 20 bp, Artificial
  20-mer unique DNA sequence
ccgatgtgtgaggcgcactt

SEQ ID NO: 9309 - DNA, 20 bp, Artificial
  20-mer unique DNA sequence
gccacgagggactccgaagc

SEQ ID NO: 9310 - DNA, 20 bp, Artificial
  20-mer unique DNA sequence
tgccgcgtaggtacgcacta

SEQ ID NO: 9311 - DNA, 20 bp, Artificial
  20-mer unique DNA sequence
cctgccatgacgtaccgaca

SEQ ID NO: 9312 - DNA, 20 bp, Artificial
  20-mer unique DNA sequence
agtctcccactccccgcaat

SEQ ID NO: 9313 - DNA, 20 bp, Artificial
  20-mer unique DNA sequence
aggaagacgcaaccaacccg

SEQ ID NO: 9314 - DNA, 20 bp, Artificial
  20-mer unique DNA sequence
cctccaatcctcacctcggc

SEQ ID NO: 9315 - DNA, 20 bp, Artificial
  20-mer unique DNA sequence
tgggaaacaacgtcggagga

SEQ ID NO: 9316 - DNA, 20 bp, Artificial
  20-mer unique DNA sequence
ttgctgtggcggaatgtgga

SEQ ID NO: 9317 - DNA, 20 bp, Artificial
  20-mer unique DNA sequence
acgacgaccccacggacatc

SEQ ID NO: 9318 - DNA, 20 bp, Artificial
  20-mer unique DNA sequence
ccgtgccacaagcgtagcga

SEQ ID NO: 9319 - DNA, 20 bp, Artificial
  20-mer unique DNA sequence
aaccgatggaagggcgcttt

SEQ ID NO: 9320 - DNA, 20 bp, Artificial
  20-mer unique DNA sequence
aggcgcgtaccgggattttg

SEQ ID NO: 9321 - DNA, 20 bp, Artificial
  20-mer unique DNA sequence
tcagtccatccgctatcgcc

SEQ ID NO: 9322 - DNA, 20 bp, Artificial
  20-mer unique DNA sequence
gtcgccatcccctagctcca

SEQ ID NO: 9323 - DNA, 20 bp, Artificial
  20-mer unique DNA sequence
gcacgaatgagacagggcgc

SEQ ID NO: 9324 - DNA, 20 bp, Artificial
  20-mer unique DNA sequence
agcctaattgcgagcggtgg

SEQ ID NO: 9325 - DNA, 20 bp, Artificial
  20-mer unique DNA sequence
cggtcttggatatcgcccca

SEQ ID NO: 9326 - DNA, 20 bp, Artificial
  20-mer unique DNA sequence
tgtgcacggtgtcgccatta

SEQ ID NO: 9327 - DNA, 20 bp, Artificial
  20-mer unique DNA sequence
acacgatctgacgcgtgtgg

SEQ ID NO: 9328 - DNA, 20 bp, Artificial
  20-mer unique DNA sequence
cactggataacgagggccgg

SEQ ID NO: 9329 - DNA, 20 bp, Artificial
  20-mer unique DNA sequence
cctgaaccccccgacagacg

SEQ ID NO: 9330 - DNA, 20 bp, Artificial
  20-mer unique DNA sequence
aaacaacaagggcaacggcg

SEQ ID NO: 9331 - DNA, 20 bp, Artificial
  20-mer unique DNA sequence
gcagggcgccgaaacgatac

SEQ ID NO: 9332 - DNA, 20 bp, Artificial
  20-mer unique DNA sequence
cggacggccctattgcacac

SEQ ID NO: 9333 - DNA, 20 bp, Artificial
  20-mer unique DNA sequence
ttgttgcggctatgtcgggg

SEQ ID NO: 9334 - DNA, 20 bp, Artificial
  20-mer unique DNA sequence
cgaaggcggcgattaatgga

SEQ ID NO: 9335 - DNA, 20 bp, Artificial
  20-mer unique DNA sequence
gtggctactcggacgggggg

SEQ ID NO: 9336 - DNA, 20 bp, Artificial
  20-mer unique DNA sequence
caagggcgtatccacgcgaa

SEQ ID NO: 9337 - DNA, 20 bp, Artificial
  20-mer unique DNA sequence
tgccataaggcttagcgccc

SEQ ID NO: 9338 - DNA, 20 bp, Artificial
  20-mer unique DNA sequence
ttccccgctctccgctcttc

SEQ ID NO: 9339 - DNA, 20 bp, Artificial
  20-mer unique DNA sequence
gtgccacggtagaggtcaca

SEQ ID NO: 9340 - DNA, 20 bp, Artificial
  20-mer unique DNA sequence
gcgccgaaggagggcatagc

SEQ ID NO: 9341 - DNA, 20 bp, Artificial
  20-mer unique DNA sequence
cttggagtttcgggcgagga

SEQ ID NO: 9342 - DNA, 20 bp, Artificial
  20-mer unique DNA sequence
tgccagagtcggctgtacaa

SEQ ID NO: 9343 - DNA, 20 bp, Artificial
  20-mer unique DNA sequence
tccgtcttcccgcgttatgg

SEQ ID NO: 9344 - DNA, 20 bp, Artificial
  20-mer unique DNA sequence
cccccacagaatgagcccca

SEQ ID NO: 9345 - DNA, 20 bp, Artificial
  20-mer unique DNA sequence
ccgtggtgctgcctgttgac

SEQ ID NO: 9346 - DNA, 20 bp, Artificial
  20-mer unique DNA sequence
cccctctggcccctcgttac

SEQ ID NO: 9347 - DNA, 20 bp, Artificial
  20-mer unique DNA sequence
caccaccccgcttccctccc

SEQ ID NO: 9348 - DNA, 20 bp, Artificial
  20-mer unique DNA sequence
agtgtggtgggggggggaca

SEQ ID NO: 9349 - DNA, 20 bp, Artificial
  20-mer unique DNA sequence
tcccgactccaccgtttgcc

SEQ ID NO: 9350 - DNA, 20 bp, Artificial
  20-mer unique DNA sequence
tcggttaagcgcagggcagg

SEQ ID NO: 9351 - DNA, 20 bp, Artificial
  20-mer unique DNA sequence
gatggcgcatagctagccca

SEQ ID NO: 9352 - DNA, 20 bp, Artificial
  20-mer unique DNA sequence
cgccaacccgctttactcgc

SEQ ID NO: 9353 - DNA, 20 bp, Artificial
  20-mer unique DNA sequence
acccccgtcccctgtccaag

SEQ ID NO: 9354 - DNA, 20 bp, Artificial
  20-mer unique DNA sequence
tctcgcccccgaatcatccg

SEQ ID NO: 9355 - DNA, 20 bp, Artificial
  20-mer unique DNA sequence
gggtgacgtatcggcgatgt

SEQ ID NO: 9356 - DNA, 20 bp, Artificial
  20-mer unique DNA sequence
tctgaccgcgccaaactgag

SEQ ID NO: 9357 - DNA, 20 bp, Artificial
  20-mer unique DNA sequence
gtgtaactgcccccctcgga

SEQ ID NO: 9358 - DNA, 20 bp, Artificial
  20-mer unique DNA sequence
gaaagacccgccccgactgt

SEQ ID NO: 9359 - DNA, 20 bp, Artificial
  20-mer unique DNA sequence
ttcggcttggtttttgccgc

SEQ ID NO: 9360 - DNA, 20 bp, Artificial
  20-mer unique DNA sequence
cgagttacggtccgtcgcat

SEQ ID NO: 9361 - DNA, 20 bp, Artificial
  20-mer unique DNA sequence
ccatttacgcaactcccgca

SEQ ID NO: 9362 - DNA, 20 bp, Artificial
  20-mer unique DNA sequence
gctagggaggttggcgcatg

SEQ ID NO: 9363 - DNA, 20 bp, Artificial
  20-mer unique DNA sequence
ggtgctccccgcctgaaatt

SEQ ID NO: 9364 - DNA, 20 bp, Artificial
  20-mer unique DNA sequence
acccaacgaacgatcaccgc

SEQ ID NO: 9365 - DNA, 20 bp, Artificial
  20-mer unique DNA sequence
atttggttgggggatggggg

SEQ ID NO: 9366 - DNA, 20 bp, Artificial
  20-mer unique DNA sequence
aacgagccaaaaccaggggc

SEQ ID NO: 9367 - DNA, 20 bp, Artificial
  20-mer unique DNA sequence
tttctgtcttccccggccga

SEQ ID NO: 9368 - DNA, 20 bp, Artificial
  20-mer unique DNA sequence
agtacgcgcacggtacatct

SEQ ID NO: 9369 - DNA, 20 bp, Artificial
  20-mer unique DNA sequence
gaacaggctcttcacgggga

SEQ ID NO: 9370 - DNA, 20 bp, Artificial
  20-mer unique DNA sequence
gagcgtgcgaaaatggcgta

SEQ ID NO: 9371 - DNA, 20 bp, Artificial
  20-mer unique DNA sequence
ctggtgtcatggtgggccgg

SEQ ID NO: 9372 - DNA, 20 bp, Artificial
  20-mer unique DNA sequence
cgctacacccgaccgactca

SEQ ID NO: 9373 - DNA, 20 bp, Artificial
  20-mer unique DNA sequence
gcaaccccgcaacgtattca

SEQ ID NO: 9374 - DNA, 20 bp, Artificial
  20-mer unique DNA sequence
tggggggcgcattcttgtac

SEQ ID NO: 9375 - DNA, 20 bp, Artificial
  20-mer unique DNA sequence
catcgcccacattagcaccg

SEQ ID NO: 9376 - DNA, 20 bp, Artificial
  20-mer unique DNA sequence
ggggatttcagggccagagg

SEQ ID NO: 9377 - DNA, 20 bp, Artificial
  20-mer unique DNA sequence
attcgtgggggggttgaaca

SEQ ID NO: 9378 - DNA, 20 bp, Artificial
  20-mer unique DNA sequence
tcgaaccaaccataggcccc

SEQ ID NO: 9379 - DNA, 20 bp, Artificial
  20-mer unique DNA sequence
ttttggcggctgcgttcttg

SEQ ID NO: 9380 - DNA, 20 bp, Artificial
  20-mer unique DNA sequence
cgcgactacaagcaccacgg

SEQ ID NO: 9381 - DNA, 20 bp, Artificial
  20-mer unique DNA sequence
cgatgggtggtttttggaga

SEQ ID NO: 9382 - DNA, 20 bp, Artificial
  20-mer unique DNA sequence
tgctcggttcgctctcgctg

SEQ ID NO: 9383 - DNA, 20 bp, Artificial
  20-mer unique DNA sequence
tgcggggcattcaggcgtta

SEQ ID NO: 9384 - DNA, 20 bp, Artificial
  20-mer unique DNA sequence
gacgacacccagcaccagca

SEQ ID NO: 9385 - DNA, 20 bp, Artificial
  20-mer unique DNA sequence
caaccacccaacggcaatcg

SEQ ID NO: 9386 - DNA, 20 bp, Artificial
  20-mer unique DNA sequence
acaaacaatggtgcgccggc

SEQ ID NO: 9387 - DNA, 20 bp, Artificial
  20-mer unique DNA sequence
tcccctgataattggccccg

SEQ ID NO: 9388 - DNA, 20 bp, Artificial
  20-mer unique DNA sequence
acaagcgtcagggggtcgtc

SEQ ID NO: 9389 - DNA, 20 bp, Artificial
  20-mer unique DNA sequence
gctagcccaaccattcgccc

SEQ ID NO: 9390 - DNA, 20 bp, Artificial
  20-mer unique DNA sequence
ggcaaaacgcggattcgagc

SEQ ID NO: 9391 - DNA, 20 bp, Artificial
  20-mer unique DNA sequence
tgtatttgcccgcctttccc

SEQ ID NO: 9392 - DNA, 20 bp, Artificial
  20-mer unique DNA sequence
tcgccgtttagtgagcccgc

SEQ ID NO: 9393 - DNA, 20 bp, Artificial
  20-mer unique DNA sequence
atggatgggacttcgcggac

SEQ ID NO: 9394 - DNA, 20 bp, Artificial
  20-mer unique DNA sequence
tggaatcgggggagttggac

SEQ ID NO: 9395 - DNA, 20 bp, Artificial
  20-mer unique DNA sequence
ccgtgaaacaccccgccttt

SEQ ID NO: 9396 - DNA, 20 bp, Artificial
  20-mer unique DNA sequence
tccgcctggtcatccctcct

SEQ ID NO: 9397 - DNA, 20 bp, Artificial
  20-mer unique DNA sequence
ctcaaggaatggggaaccgc

SEQ ID NO: 9398 - DNA, 20 bp, Artificial
  20-mer unique DNA sequence
accgacgattgccgggttac

SEQ ID NO: 9399 - DNA, 20 bp, Artificial
  20-mer unique DNA sequence
ttagtgccgcgagacactcc

SEQ ID NO: 9400 - DNA, 20 bp, Artificial
  20-mer unique DNA sequence
tgccgggtagtcggtggtga

SEQ ID NO: 9401 - DNA, 20 bp, Artificial
  20-mer unique DNA sequence
actcgagccagcacccggac

SEQ ID NO: 9402 - DNA, 20 bp, Artificial
  20-mer unique DNA sequence
ctgtgggcggataacgtcga

SEQ ID NO: 9403 - DNA, 20 bp, Artificial
  20-mer unique DNA sequence
atcaccttcgcggccttacg

SEQ ID NO: 9404 - DNA, 20 bp, Artificial
  20-mer unique DNA sequence
ccgctgccgaacccatagac

SEQ ID NO: 9405 - DNA, 20 bp, Artificial
  20-mer unique DNA sequence
ccagaggggtggtgcgatga

SEQ ID NO: 9406 - DNA, 20 bp, Artificial
  20-mer unique DNA sequence
ggcaggcgaatgcgaaatgc

SEQ ID NO: 9407 - DNA, 20 bp, Artificial
  20-mer unique DNA sequence
ggctaaaagggccacgggat

SEQ ID NO: 9408 - DNA, 20 bp, Artificial
  20-mer unique DNA sequence
aacccatttccaccgctcgt

SEQ ID NO: 9409 - DNA, 20 bp, Artificial
  20-mer unique DNA sequence
gcaaatgaaggaggccggct

SEQ ID NO: 9410 - DNA, 20 bp, Artificial
  20-mer unique DNA sequence
ccccccttgtcgtccccata

SEQ ID NO: 9411 - DNA, 20 bp, Artificial
  20-mer unique DNA sequence
tgactgagaggggttcggcc

SEQ ID NO: 9412 - DNA, 20 bp, Artificial
  20-mer unique DNA sequence
acccgtgtcgggtaaccttc

SEQ ID NO: 9413 - DNA, 20 bp, Artificial
  20-mer unique DNA sequence
tctcgataggcatcgcaccc

SEQ ID NO: 9414 - DNA, 20 bp, Artificial
  20-mer unique DNA sequence
atcccgtgtcccgttctccc

SEQ ID NO: 9415 - DNA, 20 bp, Artificial
  20-mer unique DNA sequence
cgggacaatggggctggctt

SEQ ID NO: 9416 - DNA, 20 bp, Artificial
  20-mer unique DNA sequence
tcgagcgctacgttccagac

SEQ ID NO: 9417 - DNA, 20 bp, Artificial
  20-mer unique DNA sequence
acggctccctagagcagaga

SEQ ID NO: 9418 - DNA, 20 bp, Artificial
  20-mer unique DNA sequence
tccggccgacgctgtgtatg

SEQ ID NO: 9419 - DNA, 20 bp, Artificial
  20-mer unique DNA sequence
acgcggcaaggtcatgaatg

SEQ ID NO: 9420 - DNA, 20 bp, Artificial
  20-mer unique DNA sequence
ccaagggcatcaggcggtgt

SEQ ID NO: 9421 - DNA, 20 bp, Artificial
  20-mer unique DNA sequence
tccgccaatccaaaccgtcg

SEQ ID NO: 9422 - DNA, 20 bp, Artificial
  20-mer unique DNA sequence
gagcgcgcggaattgtgatg

SEQ ID NO: 9423 - DNA, 20 bp, Artificial
  20-mer unique DNA sequence
aagccctccgcaaacgtgtg

SEQ ID NO: 9424 - DNA, 20 bp, Artificial
  20-mer unique DNA sequence
agcgaatcggggcgtgagtc

SEQ ID NO: 9425 - DNA, 20 bp, Artificial
  20-mer unique DNA sequence
gatttgcttcgaagggggcc

SEQ ID NO: 9426 - DNA, 20 bp, Artificial
  20-mer unique DNA sequence
ggtgtcgggttccttctccg

SEQ ID NO: 9427 - DNA, 20 bp, Artificial
  20-mer unique DNA sequence
ccgtgtcccctgcccttacc

SEQ ID NO: 9428 - DNA, 20 bp, Artificial
  20-mer unique DNA sequence
cggaggcgaagaggggtaag

SEQ ID NO: 9429 - DNA, 20 bp, Artificial
  20-mer unique DNA sequence
cgagcgaaaacaccgggaat

SEQ ID NO: 9430 - DNA, 20 bp, Artificial
  20-mer unique DNA sequence
ccctcatctgccccaaaacg

SEQ ID NO: 9431 - DNA, 20 bp, Artificial
  20-mer unique DNA sequence
ttgacgggggcgtaggtgat

SEQ ID NO: 9432 - DNA, 20 bp, Artificial
  20-mer unique DNA sequence
ggtcgtcatccggaacgact

SEQ ID NO: 9433 - DNA, 20 bp, Artificial
  20-mer unique DNA sequence
ccgtactgcgtagtcggaca

SEQ ID NO: 9434 - DNA, 20 bp, Artificial
  20-mer unique DNA sequence
gacatacccccccaacggca

SEQ ID NO: 9435 - DNA, 20 bp, Artificial
  20-mer unique DNA sequence
tcttgcccccatcacaccgg

SEQ ID NO: 9436 - DNA, 20 bp, Artificial
  20-mer unique DNA sequence
gagggcgtcgctcaagatga

SEQ ID NO: 9437 - DNA, 20 bp, Artificial
  20-mer unique DNA sequence
cgattggcgtcgctcgatga

SEQ ID NO: 9438 - DNA, 20 bp, Artificial
  20-mer unique DNA sequence
cccccacggcattcattacc

SEQ ID NO: 9439 - DNA, 20 bp, Artificial
  20-mer unique DNA sequence
cgaaccgatcactgccgaaa

SEQ ID NO: 9440 - DNA, 20 bp, Artificial
  20-mer unique DNA sequence
tggctggtctcggggctctc

SEQ ID NO: 9441 - DNA, 20 bp, Artificial
  20-mer unique DNA sequence
acctttgtgcccctgaaccg

SEQ ID NO: 9442 - DNA, 20 bp, Artificial
  20-mer unique DNA sequence
cccggatcaacaacccacgt

SEQ ID NO: 9443 - DNA, 20 bp, Artificial
  20-mer unique DNA sequence
gcttccccgtgatcctttgc

SEQ ID NO: 9444 - DNA, 20 bp, Artificial
  20-mer unique DNA sequence
tgcggatattctggcgcacg

SEQ ID NO: 9445 - DNA, 20 bp, Artificial
  20-mer unique DNA sequence
tggttcggcgcgggctagta

SEQ ID NO: 9446 - DNA, 20 bp, Artificial
  20-mer unique DNA sequence
ggggcgtgtgatgtcgatgg

SEQ ID NO: 9447 - DNA, 20 bp, Artificial
  20-mer unique DNA sequence
ctcggcccccctacttcgca

SEQ ID NO: 9448 - DNA, 20 bp, Artificial
  20-mer unique DNA sequence
agtgcaggagagggcgaatc

SEQ ID NO: 9449 - DNA, 20 bp, Artificial
  20-mer unique DNA sequence
aaacaaaacacgctgcctgc

SEQ ID NO: 9450 - DNA, 20 bp, Artificial
  20-mer unique DNA sequence
ccgagggttatcgacgaggg

SEQ ID NO: 9451 - DNA, 20 bp, Artificial
  20-mer unique DNA sequence
tgcggacgggtaggaattgg

SEQ ID NO: 9452 - DNA, 20 bp, Artificial
  20-mer unique DNA sequence
attgcggggctctaagggct

SEQ ID NO: 9453 - DNA, 20 bp, Artificial
  20-mer unique DNA sequence
taagcgatggcccgaagagg

SEQ ID NO: 9454 - DNA, 20 bp, Artificial
  20-mer unique DNA sequence
ggaatggcgagaatgcggag

SEQ ID NO: 9455 - DNA, 20 bp, Artificial
  20-mer unique DNA sequence
cgtgtagggcgctgcttgga

SEQ ID NO: 9456 - DNA, 20 bp, Artificial
  20-mer unique DNA sequence
ctcgactcccgcaacaagcc

SEQ ID NO: 9457 - DNA, 20 bp, Artificial
  20-mer unique DNA sequence
tttggtgcgaaggtgcgtgc

SEQ ID NO: 9458 - DNA, 20 bp, Artificial
  20-mer unique DNA sequence
taaagcgccgcgcgagcagg

SEQ ID NO: 9459 - DNA, 20 bp, Artificial
  20-mer unique DNA sequence
ttcgtctcggggtggctgct

SEQ ID NO: 9460 - DNA, 20 bp, Artificial
  20-mer unique DNA sequence
tcgtttctgtcgctgtgcat

SEQ ID NO: 9461 - DNA, 20 bp, Artificial
  20-mer unique DNA sequence
cccgaaccacagcgacaccc

SEQ ID NO: 9462 - DNA, 20 bp, Artificial
  20-mer unique DNA sequence
ccgcctccccgcctaaaaac

SEQ ID NO: 9463 - DNA, 20 bp, Artificial
  20-mer unique DNA sequence
accgccgaaccctgacctcc

SEQ ID NO: 9464 - DNA, 20 bp, Artificial
  20-mer unique DNA sequence
tgatggcgtccgaggtgaag

SEQ ID NO: 9465 - DNA, 20 bp, Artificial
  20-mer unique DNA sequence
agcggattatgggcggcaag

SEQ ID NO: 9466 - DNA, 20 bp, Artificial
  20-mer unique DNA sequence
gacctgcgaaccccctcctg

SEQ ID NO: 9467 - DNA, 20 bp, Artificial
  20-mer unique DNA sequence
aacagcttggtcgggcagga

SEQ ID NO: 9468 - DNA, 20 bp, Artificial
  20-mer unique DNA sequence
ggtggggggttggggtcact

SEQ ID NO: 9469 - DNA, 20 bp, Artificial
  20-mer unique DNA sequence
tcacggggttcgttcagcac

SEQ ID NO: 9470 - DNA, 20 bp, Artificial
  20-mer unique DNA sequence
ttggacaggcggactgctcg

SEQ ID NO: 9471 - DNA, 20 bp, Artificial
  20-mer unique DNA sequence
tgcccatcatcccgcagtac

SEQ ID NO: 9472 - DNA, 20 bp, Artificial
  20-mer unique DNA sequence
acggtgccctcattttcgga

SEQ ID NO: 9473 - DNA, 20 bp, Artificial
  20-mer unique DNA sequence
accccatgttcgccgttcac

SEQ ID NO: 9474 - DNA, 20 bp, Artificial
  20-mer unique DNA sequence
caccgccaagaatccacgca

SEQ ID NO: 9475 - DNA, 20 bp, Artificial
  20-mer unique DNA sequence
agtgatccgcacggttgcat

SEQ ID NO: 9476 - DNA, 20 bp, Artificial
  20-mer unique DNA sequence
accggcgctgtgccaataaa

SEQ ID NO: 9477 - DNA, 20 bp, Artificial
  20-mer unique DNA sequence
gggtctacgggccacatgct

SEQ ID NO: 9478 - DNA, 20 bp, Artificial
  20-mer unique DNA sequence
cgacgcacccgactcatttg

SEQ ID NO: 9479 - DNA, 20 bp, Artificial
  20-mer unique DNA sequence
aaaagggcagcaggggcagc

SEQ ID NO: 9480 - DNA, 20 bp, Artificial
  20-mer unique DNA sequence
cggtgacaagaggggcgagt

SEQ ID NO: 9481 - DNA, 20 bp, Artificial
  20-mer unique DNA sequence
gcagccgtccacaccaccct

SEQ ID NO: 9482 - DNA, 20 bp, Artificial
  20-mer unique DNA sequence
acctatccccgtcccgcttg

SEQ ID NO: 9483 - DNA, 20 bp, Artificial
  20-mer unique DNA sequence
caggttaagatggcggggcg

SEQ ID NO: 9484 - DNA, 20 bp, Artificial
  20-mer unique DNA sequence
tccgttggtagccctcgctt

SEQ ID NO: 9485 - DNA, 20 bp, Artificial
  20-mer unique DNA sequence
cgtttggattcacccacccc

SEQ ID NO: 9486 - DNA, 20 bp, Artificial
  20-mer unique DNA sequence
agggaggcgctgaatgcaat

SEQ ID NO: 9487 - DNA, 20 bp, Artificial
  20-mer unique DNA sequence
cgggtgggcggattctgata

SEQ ID NO: 9488 - DNA, 20 bp, Artificial
  20-mer unique DNA sequence
ctgaccctagagaccgcgcc

SEQ ID NO: 9489 - DNA, 20 bp, Artificial
  20-mer unique DNA sequence
cgtttaccgtcccgccacag

SEQ ID NO: 9490 - DNA, 20 bp, Artificial
  20-mer unique DNA sequence
accgtgtctgacgtgctctc

SEQ ID NO: 9491 - DNA, 20 bp, Artificial
  20-mer unique DNA sequence
tctgtgtgccgggtggaagg

SEQ ID NO: 9492 - DNA, 20 bp, Artificial
  20-mer unique DNA sequence
tacccgttcctgcattccgc

SEQ ID NO: 9493 - DNA, 20 bp, Artificial
  20-mer unique DNA sequence
cacgccagtctccccctcat

SEQ ID NO: 9494 - DNA, 20 bp, Artificial
  20-mer unique DNA sequence
ggacgggcaagcaggtttca

SEQ ID NO: 9495 - DNA, 20 bp, Artificial
  20-mer unique DNA sequence
cgtgggcgcggggaatagta

SEQ ID NO: 9496 - DNA, 20 bp, Artificial
  20-mer unique DNA sequence
acacggcggggacggacata

SEQ ID NO: 9497 - DNA, 20 bp, Artificial
  20-mer unique DNA sequence
ctcttgatccgacccgccag

SEQ ID NO: 9498 - DNA, 20 bp, Artificial
  20-mer unique DNA sequence
gacgaaaggcagaccccgaa

SEQ ID NO: 9499 - DNA, 20 bp, Artificial
  20-mer unique DNA sequence
aatgcaccgacccacgagcc

SEQ ID NO: 9500 - DNA, 20 bp, Artificial
  20-mer unique DNA sequence
agtggggcaaggttagggca

SEQ ID NO: 9501 - DNA, 20 bp, Artificial
  20-mer unique DNA sequence
gaaaacggagaagggctgcg

SEQ ID NO: 9502 - DNA, 20 bp, Artificial
  20-mer unique DNA sequence
aatcatcaccgcgcacacgt

SEQ ID NO: 9503 - DNA, 20 bp, Artificial
  20-mer unique DNA sequence
ccagaggcatttccccgatc

SEQ ID NO: 9504 - DNA, 20 bp, Artificial
  20-mer unique DNA sequence
gggacatccgtacggcacat

SEQ ID NO: 9505 - DNA, 20 bp, Artificial
  20-mer unique DNA sequence
ggttgtgccgcgaaataggg

SEQ ID NO: 9506 - DNA, 20 bp, Artificial
  20-mer unique DNA sequence
tcgcccacaagcatccatcg

SEQ ID NO: 9507 - DNA, 20 bp, Artificial
  20-mer unique DNA sequence
agtccagccccccccaacta

SEQ ID NO: 9508 - DNA, 20 bp, Artificial
  20-mer unique DNA sequence
ttagcgggtcgttgttggcg

SEQ ID NO: 9509 - DNA, 20 bp, Artificial
  20-mer unique DNA sequence
ttcactcgttacccccccca

SEQ ID NO: 9510 - DNA, 20 bp, Artificial
  20-mer unique DNA sequence
aaacggggtgacggtggctg

SEQ ID NO: 9511 - DNA, 20 bp, Artificial
  20-mer unique DNA sequence
cgccaggtcccccaagtaga

SEQ ID NO: 9512 - DNA, 20 bp, Artificial
  20-mer unique DNA sequence
cgggatggggacggattttc

SEQ ID NO: 9513 - DNA, 20 bp, Artificial
  20-mer unique DNA sequence
cggggttggggaggctagaa

SEQ ID NO: 9514 - DNA, 20 bp, Artificial
  20-mer unique DNA sequence
actaactaccccccccgagc

SEQ ID NO: 9515 - DNA, 20 bp, Artificial
  20-mer unique DNA sequence
gtcggtgtggaagggcgaag

SEQ ID NO: 9516 - DNA, 20 bp, Artificial
  20-mer unique DNA sequence
agggacagcggaccttggtg

SEQ ID NO: 9517 - DNA, 20 bp, Artificial
  20-mer unique DNA sequence
agttggggcgcatggtgaca

SEQ ID NO: 9518 - DNA, 20 bp, Artificial
  20-mer unique DNA sequence
ccttaacagccatcgcgccc

SEQ ID NO: 9519 - DNA, 20 bp, Artificial
  20-mer unique DNA sequence
cccaacatctccccaaggca

SEQ ID NO: 9520 - DNA, 20 bp, Artificial
  20-mer unique DNA sequence
ctgtcccaccccgcaaaatc

SEQ ID NO: 9521 - DNA, 20 bp, Artificial
  20-mer unique DNA sequence
cgatgaagaacgccccccgt

SEQ ID NO: 9522 - DNA, 20 bp, Artificial
  20-mer unique DNA sequence
ggggcacggctgtaatcgag

SEQ ID NO: 9523 - DNA, 20 bp, Artificial
  20-mer unique DNA sequence
acgccgccactgacgaaatg

SEQ ID NO: 9524 - DNA, 20 bp, Artificial
  20-mer unique DNA sequence
ttgtcgtgcacccaggtcaa

SEQ ID NO: 9525 - DNA, 20 bp, Artificial
  20-mer unique DNA sequence
attgggctgcctgcaaggct

SEQ ID NO: 9526 - DNA, 20 bp, Artificial
  20-mer unique DNA sequence
tccataacacagtcgcgggg

SEQ ID NO: 9527 - DNA, 20 bp, Artificial
  20-mer unique DNA sequence
gggtgtctccgatcttggcg

SEQ ID NO: 9528 - DNA, 20 bp, Artificial
  20-mer unique DNA sequence
aacgacggaacaaagcgcaa

SEQ ID NO: 9529 - DNA, 20 bp, Artificial
  20-mer unique DNA sequence
ggcgtggtccgtttctgtca

SEQ ID NO: 9530 - DNA, 20 bp, Artificial
  20-mer unique DNA sequence
aacgcagggggagtaaccga

SEQ ID NO: 9531 - DNA, 20 bp, Artificial
  20-mer unique DNA sequence
tcctccattcggccgttcag

SEQ ID NO: 9532 - DNA, 20 bp, Artificial
  20-mer unique DNA sequence
ggatcggcgctaggggttgc

SEQ ID NO: 9533 - DNA, 20 bp, Artificial
  20-mer unique DNA sequence
cccctctcgcatcggtttga

SEQ ID NO: 9534 - DNA, 20 bp, Artificial
  20-mer unique DNA sequence
taggggcgtaggggtcggga

SEQ ID NO: 9535 - DNA, 20 bp, Artificial
  20-mer unique DNA sequence
cgccacaaaatcagcaccag

SEQ ID NO: 9536 - DNA, 20 bp, Artificial
  20-mer unique DNA sequence
accaccatccaattcccgca

SEQ ID NO: 9537 - DNA, 20 bp, Artificial
  20-mer unique DNA sequence
ccgcgaccgattttaccccc

SEQ ID NO: 9538 - DNA, 20 bp, Artificial
  20-mer unique DNA sequence
atcttcgccctcccctttcg

SEQ ID NO: 9539 - DNA, 20 bp, Artificial
  20-mer unique DNA sequence
atcgcccaccgcctcacaaa

SEQ ID NO: 9540 - DNA, 20 bp, Artificial
  20-mer unique DNA sequence
cgtttaagggcggatgctgg

SEQ ID NO: 9541 - DNA, 20 bp, Artificial
  20-mer unique DNA sequence
ctttgaccgattggggcgtg

SEQ ID NO: 9542 - DNA, 20 bp, Artificial
  20-mer unique DNA sequence
tcggagaggtcggttctggg

SEQ ID NO: 9543 - DNA, 20 bp, Artificial
  20-mer unique DNA sequence
ggattgtggcgcagggggtt

SEQ ID NO: 9544 - DNA, 20 bp, Artificial
  20-mer unique DNA sequence
tgtggtgctggaggtgggag

SEQ ID NO: 9545 - DNA, 20 bp, Artificial
  20-mer unique DNA sequence
cccattgcaccgatccccct

SEQ ID NO: 9546 - DNA, 20 bp, Artificial
  20-mer unique DNA sequence
tgcttccccaccctactgcc

SEQ ID NO: 9547 - DNA, 20 bp, Artificial
  20-mer unique DNA sequence
tccgtgctgtcgtctttccg

SEQ ID NO: 9548 - DNA, 20 bp, Artificial
  20-mer unique DNA sequence
ccggaggccgtaattgcagc

SEQ ID NO: 9549 - DNA, 20 bp, Artificial
  20-mer unique DNA sequence
ccgccgccgttaaagctacc

SEQ ID NO: 9550 - DNA, 20 bp, Artificial
  20-mer unique DNA sequence
cgtttaccgttgccgctccg

SEQ ID NO: 9551 - DNA, 20 bp, Artificial
  20-mer unique DNA sequence
acattggggtcgtgctcgct

SEQ ID NO: 9552 - DNA, 20 bp, Artificial
  20-mer unique DNA sequence
ggacatcttgcggggaccat

SEQ ID NO: 9553 - DNA, 20 bp, Artificial
  20-mer unique DNA sequence
gatttccacccccctctgcg

SEQ ID NO: 9554 - DNA, 20 bp, Artificial
  20-mer unique DNA sequence
aaccagaggggggcacagct

SEQ ID NO: 9555 - DNA, 20 bp, Artificial
  20-mer unique DNA sequence
agtggggttggggggatgga

SEQ ID NO: 9556 - DNA, 20 bp, Artificial
  20-mer unique DNA sequence
tcgtgcctcctttcgttggg

SEQ ID NO: 9557 - DNA, 20 bp, Artificial
  20-mer unique DNA sequence
cttcaactcgggcgccaaac

SEQ ID NO: 9558 - DNA, 20 bp, Artificial
  20-mer unique DNA sequence
gagccgagcgccatgcactt

SEQ ID NO: 9559 - DNA, 20 bp, Artificial
  20-mer unique DNA sequence
ccaaccgaaggcctcgaagc

SEQ ID NO: 9560 - DNA, 20 bp, Artificial
  20-mer unique DNA sequence
catagtttcgcgcccgtgct

SEQ ID NO: 9561 - DNA, 20 bp, Artificial
  20-mer unique DNA sequence
aggtcgggcaaggggcatgt

SEQ ID NO: 9562 - DNA, 20 bp, Artificial
  20-mer unique DNA sequence
cagcgaaaggccgggagagg

SEQ ID NO: 9563 - DNA, 20 bp, Artificial
  20-mer unique DNA sequence
ggctacctgacgggcctgga

SEQ ID NO: 9564 - DNA, 20 bp, Artificial
  20-mer unique DNA sequence
acgaaaacgccaccccactc

SEQ ID NO: 9565 - DNA, 20 bp, Artificial
  20-mer unique DNA sequence
cggtggttgcgatggttgtg

SEQ ID NO: 9566 - DNA, 20 bp, Artificial
  20-mer unique DNA sequence
cacactgccccgtttttgat

SEQ ID NO: 9567 - DNA, 20 bp, Artificial
  20-mer unique DNA sequence
aggccggcgttgcaagttta

SEQ ID NO: 9568 - DNA, 20 bp, Artificial
  20-mer unique DNA sequence
ctagccggccgtcaccaaaa

SEQ ID NO: 9569 - DNA, 20 bp, Artificial
  20-mer unique DNA sequence
aacaacggtgccgcacgatg

SEQ ID NO: 9570 - DNA, 20 bp, Artificial
  20-mer unique DNA sequence
tgctggtccttggggatgtg

SEQ ID NO: 9571 - DNA, 20 bp, Artificial
  20-mer unique DNA sequence
ggtggggcaaagtgggtcgt

SEQ ID NO: 9572 - DNA, 20 bp, Artificial
  20-mer unique DNA sequence
agccatatacctcccgggca

SEQ ID NO: 9573 - DNA, 20 bp, Artificial
  20-mer unique DNA sequence
tgggcaatcatagccgggca

SEQ ID NO: 9574 - DNA, 20 bp, Artificial
  20-mer unique DNA sequence
aatggggaacaacgaaccgg

SEQ ID NO: 9575 - DNA, 20 bp, Artificial
  20-mer unique DNA sequence
atcctgcctgctcctaccgc

SEQ ID NO: 9576 - DNA, 20 bp, Artificial
  20-mer unique DNA sequence
gccggggtgtcagtcgagat

SEQ ID NO: 9577 - DNA, 20 bp, Artificial
  20-mer unique DNA sequence
gcccacccaccgtaaccgaa

SEQ ID NO: 9578 - DNA, 20 bp, Artificial
  20-mer unique DNA sequence
tacggggtggcgagtggttc

SEQ ID NO: 9579 - DNA, 20 bp, Artificial
  20-mer unique DNA sequence
tacccccgctcgcattattc

SEQ ID NO: 9580 - DNA, 20 bp, Artificial
  20-mer unique DNA sequence
cggggtaggagggtagtgcg

SEQ ID NO: 9581 - DNA, 20 bp, Artificial
  20-mer unique DNA sequence
tcttgctatccatcccgggc

SEQ ID NO: 9582 - DNA, 20 bp, Artificial
  20-mer unique DNA sequence
tggcgaaggaaaggcgatca

SEQ ID NO: 9583 - DNA, 20 bp, Artificial
  20-mer unique DNA sequence
gaccggattgggcccttacg

SEQ ID NO: 9584 - DNA, 20 bp, Artificial
  20-mer unique DNA sequence
actgtcccgctgtgctcgtt

SEQ ID NO: 9585 - DNA, 20 bp, Artificial
  20-mer unique DNA sequence
catacaactccgtccgcgcc

SEQ ID NO: 9586 - DNA, 20 bp, Artificial
  20-mer unique DNA sequence
gagctagatcgggggcggtg

SEQ ID NO: 9587 - DNA, 20 bp, Artificial
  20-mer unique DNA sequence
cgtgcgggtgttggggagta

SEQ ID NO: 9588 - DNA, 20 bp, Artificial
  20-mer unique DNA sequence
attatcaccgggacagcgcg

SEQ ID NO: 9589 - DNA, 20 bp, Artificial
  20-mer unique DNA sequence
cccaaggtcaaggcgtccac

SEQ ID NO: 9590 - DNA, 20 bp, Artificial
  20-mer unique DNA sequence
cgtggccctgcggtttgttt

SEQ ID NO: 9591 - DNA, 20 bp, Artificial
  20-mer unique DNA sequence
attccgtcctcattgccccg

SEQ ID NO: 9592 - DNA, 20 bp, Artificial
  20-mer unique DNA sequence
caaacgacagcggcattgca

SEQ ID NO: 9593 - DNA, 20 bp, Artificial
  20-mer unique DNA sequence
attgtggtgccgaccgggtt

SEQ ID NO: 9594 - DNA, 20 bp, Artificial
  20-mer unique DNA sequence
ctaacccgccgtcgtcaccc

SEQ ID NO: 9595 - DNA, 20 bp, Artificial
  20-mer unique DNA sequence
ctagccgccccaccatttca

SEQ ID NO: 9596 - DNA, 20 bp, Artificial
  20-mer unique DNA sequence
acaaacggcggagtgcaggc

SEQ ID NO: 9597 - DNA, 20 bp, Artificial
  20-mer unique DNA sequence
tcactcctcgccccaaacgg

SEQ ID NO: 9598 - DNA, 20 bp, Artificial
  20-mer unique DNA sequence
taatgggaagggacggcagg

SEQ ID NO: 9599 - DNA, 20 bp, Artificial
  20-mer unique DNA sequence
ttttcctgaccaacgccgag

SEQ ID NO: 9600 - DNA, 20 bp, Artificial
  20-mer unique DNA sequence
gctggtgtcgttggcgaggt

SEQ ID NO: 9601 - DNA, 20 bp, Artificial
  20-mer unique DNA sequence
ggcgggtaagcgtcggaaat

SEQ ID NO: 9602 - DNA, 20 bp, Artificial
  20-mer unique DNA sequence
aaaagagtccaacgcccgca

SEQ ID NO: 9603 - DNA, 20 bp, Artificial
  20-mer unique DNA sequence
ctcgttcgcccaatgctcaa

SEQ ID NO: 9604 - DNA, 20 bp, Artificial
  20-mer unique DNA sequence
tgcaggttatgacgtgccct

SEQ ID NO: 9605 - DNA, 20 bp, Artificial
  20-mer unique DNA sequence
gagcaagtgaggtgcctcgt

SEQ ID NO: 9606 - DNA, 20 bp, Artificial
  20-mer unique DNA sequence
taagggggggtcggaaaggt

SEQ ID NO: 9607 - DNA, 20 bp, Artificial
  20-mer unique DNA sequence
cttaacgccctacgcccgga

SEQ ID NO: 9608 - DNA, 20 bp, Artificial
  20-mer unique DNA sequence
gtaatgcaaatccgggggcg

SEQ ID NO: 9609 - DNA, 20 bp, Artificial
  20-mer unique DNA sequence
cgctgtaccggtccctgctt

SEQ ID NO: 9610 - DNA, 20 bp, Artificial
  20-mer unique DNA sequence
cgccaaccatccgcacttcc

SEQ ID NO: 9611 - DNA, 20 bp, Artificial
  20-mer unique DNA sequence
tggggggagaacgggtgagc

SEQ ID NO: 9612 - DNA, 20 bp, Artificial
  20-mer unique DNA sequence
gctcgtttcttgcccgccta

SEQ ID NO: 9613 - DNA, 20 bp, Artificial
  20-mer unique DNA sequence
cgctccaccttaccccatgc

SEQ ID NO: 9614 - DNA, 20 bp, Artificial
  20-mer unique DNA sequence
acccgaggcgactcgctttt

SEQ ID NO: 9615 - DNA, 20 bp, Artificial
  20-mer unique DNA sequence
accctgcctagggacacctt

SEQ ID NO: 9616 - DNA, 20 bp, Artificial
  20-mer unique DNA sequence
gcgatggagggtaggggcaa

SEQ ID NO: 9617 - DNA, 20 bp, Artificial
  20-mer unique DNA sequence
gatggaagaaggcggcggat

SEQ ID NO: 9618 - DNA, 20 bp, Artificial
  20-mer unique DNA sequence
atacgctaggcagaccacgc

SEQ ID NO: 9619 - DNA, 20 bp, Artificial
  20-mer unique DNA sequence
gcgtggatacctgagtgcca

SEQ ID NO: 9620 - DNA, 20 bp, Artificial
  20-mer unique DNA sequence
ctcgttctgatgcggaccgg

SEQ ID NO: 9621 - DNA, 20 bp, Artificial
  20-mer unique DNA sequence
acaacacgagccccaccctc

SEQ ID NO: 9622 - DNA, 20 bp, Artificial
  20-mer unique DNA sequence
ctcaatgcgcgcgaccctac

SEQ ID NO: 9623 - DNA, 20 bp, Artificial
  20-mer unique DNA sequence
gggtggacatgaggtgagcg

SEQ ID NO: 9624 - DNA, 20 bp, Artificial
  20-mer unique DNA sequence
tcgcaccctaggggtatcca

SEQ ID NO: 9625 - DNA, 20 bp, Artificial
  20-mer unique DNA sequence
tacaccggactccgtgagca

SEQ ID NO: 9626 - DNA, 20 bp, Artificial
  20-mer unique DNA sequence
cccgccgctattcttctcgc

SEQ ID NO: 9627 - DNA, 20 bp, Artificial
  20-mer unique DNA sequence
gggacggtggaacatcaggg

SEQ ID NO: 9628 - DNA, 20 bp, Artificial
  20-mer unique DNA sequence
cccacgctagcccacaaccg

SEQ ID NO: 9629 - DNA, 20 bp, Artificial
  20-mer unique DNA sequence
cccgttccgcgtagctgttg

SEQ ID NO: 9630 - DNA, 20 bp, Artificial
  20-mer unique DNA sequence
atgggatgcgttgggttccg

SEQ ID NO: 9631 - DNA, 20 bp, Artificial
  20-mer unique DNA sequence
gcgtggtcttggagcgggtg

SEQ ID NO: 9632 - DNA, 20 bp, Artificial
  20-mer unique DNA sequence
caagatttcggggcgggagt

SEQ ID NO: 9633 - DNA, 20 bp, Artificial
  20-mer unique DNA sequence
ggatgggggggtctaatggg

SEQ ID NO: 9634 - DNA, 20 bp, Artificial
  20-mer unique DNA sequence
tccttaacgatggggcgagc

SEQ ID NO: 9635 - DNA, 20 bp, Artificial
  20-mer unique DNA sequence
tgcctccgccaaatttcccc

SEQ ID NO: 9636 - DNA, 20 bp, Artificial
  20-mer unique DNA sequence
atggggggacgttaacggca

SEQ ID NO: 9637 - DNA, 20 bp, Artificial
  20-mer unique DNA sequence
gcgggtcgtgcctggaagtt

SEQ ID NO: 9638 - DNA, 20 bp, Artificial
  20-mer unique DNA sequence
tggtaaaaacgcgtgcctgc

SEQ ID NO: 9639 - DNA, 20 bp, Artificial
  20-mer unique DNA sequence
ccactgcatgcttgacccgc

SEQ ID NO: 9640 - DNA, 20 bp, Artificial
  20-mer unique DNA sequence
cacctcgaagaacccagccc

SEQ ID NO: 9641 - DNA, 20 bp, Artificial
  20-mer unique DNA sequence
aaaccacacgcacccccagt

SEQ ID NO: 9642 - DNA, 20 bp, Artificial
  20-mer unique DNA sequence
ccacaccccgccatcaagtc

SEQ ID NO: 9643 - DNA, 20 bp, Artificial
  20-mer unique DNA sequence
cgcgggctcttcatcgtgtg

SEQ ID NO: 9644 - DNA, 20 bp, Artificial
  20-mer unique DNA sequence
gttcgtgtgggcatggggtc

SEQ ID NO: 9645 - DNA, 20 bp, Artificial
  20-mer unique DNA sequence
aacagaggacgcacgggagg

SEQ ID NO: 9646 - DNA, 20 bp, Artificial
  20-mer unique DNA sequence
gaggtacatcggtgcgcggg

SEQ ID NO: 9647 - DNA, 20 bp, Artificial
  20-mer unique DNA sequence
cacttaccgacgcccacact

SEQ ID NO: 9648 - DNA, 20 bp, Artificial
  20-mer unique DNA sequence
tcattctgcaaccaacgccc

SEQ ID NO: 9649 - DNA, 20 bp, Artificial
  20-mer unique DNA sequence
ccgcgccatcacttccatca

SEQ ID NO: 9650 - DNA, 20 bp, Artificial
  20-mer unique DNA sequence
accttgtgtatcggggcggc

SEQ ID NO: 9651 - DNA, 20 bp, Artificial
  20-mer unique DNA sequence
caccagggagagagggccgc

SEQ ID NO: 9652 - DNA, 20 bp, Artificial
  20-mer unique DNA sequence
acctcgcgctctcgtctcca

SEQ ID NO: 9653 - DNA, 20 bp, Artificial
  20-mer unique DNA sequence
ccgccccttcctgccttcac

SEQ ID NO: 9654 - DNA, 20 bp, Artificial
  20-mer unique DNA sequence
gactggactagcgggcttgc

SEQ ID NO: 9655 - DNA, 20 bp, Artificial
  20-mer unique DNA sequence
gtggtcgtcgggagttgggt

SEQ ID NO: 9656 - DNA, 20 bp, Artificial
  20-mer unique DNA sequence
attcgtacctgcgttgcccc

SEQ ID NO: 9657 - DNA, 20 bp, Artificial
  20-mer unique DNA sequence
gcgcggccgaaactctatga

SEQ ID NO: 9658 - DNA, 20 bp, Artificial
  20-mer unique DNA sequence
aaggtttggcggtgtttcgg

SEQ ID NO: 9659 - DNA, 20 bp, Artificial
  20-mer unique DNA sequence
gaggcggcggtcggataaac

SEQ ID NO: 9660 - DNA, 20 bp, Artificial
  20-mer unique DNA sequence
aaaacacccagatcgcccca

SEQ ID NO: 9661 - DNA, 20 bp, Artificial
  20-mer unique DNA sequence
gcagggtacagccgggattg

SEQ ID NO: 9662 - DNA, 20 bp, Artificial
  20-mer unique DNA sequence
tagagggccgcggattggta

SEQ ID NO: 9663 - DNA, 20 bp, Artificial
  20-mer unique DNA sequence
gctccgcgcctcaccttagt

SEQ ID NO: 9664 - DNA, 20 bp, Artificial
  20-mer unique DNA sequence
cttggttcgtcccgcttcgg

SEQ ID NO: 9665 - DNA, 20 bp, Artificial
  20-mer unique DNA sequence
catcccagtttcccgcccaa

SEQ ID NO: 9666 - DNA, 20 bp, Artificial
  20-mer unique DNA sequence
ccataatccagccgcaacgc

SEQ ID NO: 9667 - DNA, 20 bp, Artificial
  20-mer unique DNA sequence
accttgctgggaaaagccga

SEQ ID NO: 9668 - DNA, 20 bp, Artificial
  20-mer unique DNA sequence
gtgttgcggcgtggttttgc

SEQ ID NO: 9669 - DNA, 20 bp, Artificial
  20-mer unique DNA sequence
gcaacgacggaggggagtgc

SEQ ID NO: 9670 - DNA, 20 bp, Artificial
  20-mer unique DNA sequence
cggggtaattcggttgcggc

SEQ ID NO: 9671 - DNA, 20 bp, Artificial
  20-mer unique DNA sequence
cagcctccagcaaccgacca

SEQ ID NO: 9672 - DNA, 20 bp, Artificial
  20-mer unique DNA sequence
cggccagaacacatccaccc

SEQ ID NO: 9673 - DNA, 20 bp, Artificial
  20-mer unique DNA sequence
ctttggagagttgcgcgcgg

SEQ ID NO: 9674 - DNA, 20 bp, Artificial
  20-mer unique DNA sequence
tctcagccgcccgataaacc

SEQ ID NO: 9675 - DNA, 20 bp, Artificial
  20-mer unique DNA sequence
gaaggcggcagacgaaaccc

SEQ ID NO: 9676 - DNA, 20 bp, Artificial
  20-mer unique DNA sequence
ggggcgtagggattgggtct

SEQ ID NO: 9677 - DNA, 20 bp, Artificial
  20-mer unique DNA sequence
cggtgggtgcgctctttttt

SEQ ID NO: 9678 - DNA, 20 bp, Artificial
  20-mer unique DNA sequence
ggaccaacccgatggcaaca

SEQ ID NO: 9679 - DNA, 20 bp, Artificial
  20-mer unique DNA sequence
caacatggggtcgcttcctg

SEQ ID NO: 9680 - DNA, 20 bp, Artificial
  20-mer unique DNA sequence
aagcggggcactgggtaaca

SEQ ID NO: 9681 - DNA, 20 bp, Artificial
  20-mer unique DNA sequence
gccgtgtccccgttcgtaaa

SEQ ID NO: 9682 - DNA, 20 bp, Artificial
  20-mer unique DNA sequence
gagatgcatgcgagaccgcg

SEQ ID NO: 9683 - DNA, 20 bp, Artificial
  20-mer unique DNA sequence
ggtaccatgcttcggggcca

SEQ ID NO: 9684 - DNA, 20 bp, Artificial
  20-mer unique DNA sequence
tgcagttattcaggggccgc

SEQ ID NO: 9685 - DNA, 20 bp, Artificial
  20-mer unique DNA sequence
cgccctcctacgttgcaccg

SEQ ID NO: 9686 - DNA, 20 bp, Artificial
  20-mer unique DNA sequence
ccccgaaggcgtcatccaac

SEQ ID NO: 9687 - DNA, 20 bp, Artificial
  20-mer unique DNA sequence
taccaggggggaggcgtcta

SEQ ID NO: 9688 - DNA, 20 bp, Artificial
  20-mer unique DNA sequence
ccttgccttgcgttcccttg

SEQ ID NO: 9689 - DNA, 20 bp, Artificial
  20-mer unique DNA sequence
acaggtgctatgcgggggcc

SEQ ID NO: 9690 - DNA, 20 bp, Artificial
  20-mer unique DNA sequence
gtctggttcgcctaccttgc

SEQ ID NO: 9691 - DNA, 20 bp, Artificial
  20-mer unique DNA sequence
agcctcgccgtttttacccc

SEQ ID NO: 9692 - DNA, 20 bp, Artificial
  20-mer unique DNA sequence
tgggggaagtcacagcgtcg

SEQ ID NO: 9693 - DNA, 20 bp, Artificial
  20-mer unique DNA sequence
gcccagcactttcaaccgcg

SEQ ID NO: 9694 - DNA, 20 bp, Artificial
  20-mer unique DNA sequence
ggtcactcaatcccgcacga

SEQ ID NO: 9695 - DNA, 20 bp, Artificial
  20-mer unique DNA sequence
cggagagcatgcgcaagaaa

SEQ ID NO: 9696 - DNA, 20 bp, Artificial
  20-mer unique DNA sequence
cggtagggcgtcaaaacggt

SEQ ID NO: 9697 - DNA, 20 bp, Artificial
  20-mer unique DNA sequence
acccgccagtccgcgataga

SEQ ID NO: 9698 - DNA, 20 bp, Artificial
  20-mer unique DNA sequence
ccgacaaccaaaccagcccc

SEQ ID NO: 9699 - DNA, 20 bp, Artificial
  20-mer unique DNA sequence
tgaccctcccgcacagcgaa

SEQ ID NO: 9700 - DNA, 20 bp, Artificial
  20-mer unique DNA sequence
gcgccgtccaaactccaaac

SEQ ID NO: 9701 - DNA, 20 bp, Artificial
  20-mer unique DNA sequence
cattctttttgggcccggag

SEQ ID NO: 9702 - DNA, 20 bp, Artificial
  20-mer unique DNA sequence
aagaggcgtgcggggaaagg

SEQ ID NO: 9703 - DNA, 20 bp, Artificial
  20-mer unique DNA sequence
tcgcccaaccacagattcca

SEQ ID NO: 9704 - DNA, 20 bp, Artificial
  20-mer unique DNA sequence
cgctcgcccctttgtgtctc

SEQ ID NO: 9705 - DNA, 20 bp, Artificial
  20-mer unique DNA sequence
agaacaggggatgcggaggg

SEQ ID NO: 9706 - DNA, 20 bp, Artificial
  20-mer unique DNA sequence
aacacgtcccctccccatcc

SEQ ID NO: 9707 - DNA, 20 bp, Artificial
  20-mer unique DNA sequence
caggtacgcgcaggaatggc

SEQ ID NO: 9708 - DNA, 20 bp, Artificial
  20-mer unique DNA sequence
aagtctgcggcgggaatgga

SEQ ID NO: 9709 - DNA, 20 bp, Artificial
  20-mer unique DNA sequence
aagcccaaccccgcgatgta

SEQ ID NO: 9710 - DNA, 20 bp, Artificial
  20-mer unique DNA sequence
tcgcgagcaaggacaacagc

SEQ ID NO: 9711 - DNA, 20 bp, Artificial
  20-mer unique DNA sequence
ctgaggggcatgtcgctgtg

SEQ ID NO: 9712 - DNA, 20 bp, Artificial
  20-mer unique DNA sequence
cggtggacgagtggcgaagc

SEQ ID NO: 9713 - DNA, 20 bp, Artificial
  20-mer unique DNA sequence
tcgtgtggctcgtcgtgaaa

SEQ ID NO: 9714 - DNA, 20 bp, Artificial
  20-mer unique DNA sequence
gggaataaggcgacgaccag

SEQ ID NO: 9715 - DNA, 20 bp, Artificial
  20-mer unique DNA sequence
ctcccccgattctgccttgc

SEQ ID NO: 9716 - DNA, 20 bp, Artificial
  20-mer unique DNA sequence
tggaggctgtgggacacttt

SEQ ID NO: 9717 - DNA, 20 bp, Artificial
  20-mer unique DNA sequence
tacccctccgcttcctcggt

SEQ ID NO: 9718 - DNA, 20 bp, Artificial
  20-mer unique DNA sequence
taccgcaagcctccacgtcc

SEQ ID NO: 9719 - DNA, 20 bp, Artificial
  20-mer unique DNA sequence
agcaagcacggggcaaggac

SEQ ID NO: 9720 - DNA, 20 bp, Artificial
  20-mer unique DNA sequence
aatgccaacccgaaaacccg

SEQ ID NO: 9721 - DNA, 20 bp, Artificial
  20-mer unique DNA sequence
cggttcccacctcccttgaa

SEQ ID NO: 9722 - DNA, 20 bp, Artificial
  20-mer unique DNA sequence
gatccacacttaggcgggct

SEQ ID NO: 9723 - DNA, 20 bp, Artificial
  20-mer unique DNA sequence
agtacacgcgctagtgtgcc

SEQ ID NO: 9724 - DNA, 20 bp, Artificial
  20-mer unique DNA sequence
tgcgcacgttcttccatcca

SEQ ID NO: 9725 - DNA, 20 bp, Artificial
  20-mer unique DNA sequence
tggcattttcttccccgacg

SEQ ID NO: 9726 - DNA, 20 bp, Artificial
  20-mer unique DNA sequence
cccaacaaaaaccacgcgaa

SEQ ID NO: 9727 - DNA, 20 bp, Artificial
  20-mer unique DNA sequence
gcgcagcaaacagagcaggg

SEQ ID NO: 9728 - DNA, 20 bp, Artificial
  20-mer unique DNA sequence
ggggacaaaaggcggcagga

SEQ ID NO: 9729 - DNA, 20 bp, Artificial
  20-mer unique DNA sequence
gaggttgttttcggcaggcg

SEQ ID NO: 9730 - DNA, 20 bp, Artificial
  20-mer unique DNA sequence
acatccgcctattcccccgc

SEQ ID NO: 9731 - DNA, 20 bp, Artificial
  20-mer unique DNA sequence
tgtccttgccccgacctttt

SEQ ID NO: 9732 - DNA, 20 bp, Artificial
  20-mer unique DNA sequence
tcgctcccatcccaatcccc

SEQ ID NO: 9733 - DNA, 20 bp, Artificial
  20-mer unique DNA sequence
gccattcggggggggtactc

SEQ ID NO: 9734 - DNA, 20 bp, Artificial
  20-mer unique DNA sequence
ccaccttctcgttgctcccc

SEQ ID NO: 9735 - DNA, 20 bp, Artificial
  20-mer unique DNA sequence
cgtgcaatcctacccccgga

SEQ ID NO: 9736 - DNA, 20 bp, Artificial
  20-mer unique DNA sequence
cgctgtgctcgtgggctgtt

SEQ ID NO: 9737 - DNA, 20 bp, Artificial
  20-mer unique DNA sequence
ttgaggcttgttcgggggtg

SEQ ID NO: 9738 - DNA, 20 bp, Artificial
  20-mer unique DNA sequence
tatgacaccctgaaccggcc

SEQ ID NO: 9739 - DNA, 20 bp, Artificial
  20-mer unique DNA sequence
atgatcgcgcgccctccttt

SEQ ID NO: 9740 - DNA, 20 bp, Artificial
  20-mer unique DNA sequence
tgccgaaacaagcctcccac

SEQ ID NO: 9741 - DNA, 20 bp, Artificial
  20-mer unique DNA sequence
ctgcgccctcctcattgttg

SEQ ID NO: 9742 - DNA, 20 bp, Artificial
  20-mer unique DNA sequence
cgacacgtgttctcaaggcg

SEQ ID NO: 9743 - DNA, 20 bp, Artificial
  20-mer unique DNA sequence
agttggaccgcctaagcgac

SEQ ID NO: 9744 - DNA, 20 bp, Artificial
  20-mer unique DNA sequence
ggtgtaggcgggggtaaggc

SEQ ID NO: 9745 - DNA, 20 bp, Artificial
  20-mer unique DNA sequence
tcgtggggcatttcagcatc

SEQ ID NO: 9746 - DNA, 20 bp, Artificial
  20-mer unique DNA sequence
ggcctgccccccattgccta

SEQ ID NO: 9747 - DNA, 20 bp, Artificial
  20-mer unique DNA sequence
agcgaggtggagagtggggg

SEQ ID NO: 9748 - DNA, 20 bp, Artificial
  20-mer unique DNA sequence
ggctgagaggggcgagacgg

SEQ ID NO: 9749 - DNA, 20 bp, Artificial
  20-mer unique DNA sequence
catcagcccgcccaccatag

SEQ ID NO: 9750 - DNA, 20 bp, Artificial
  20-mer unique DNA sequence
aacattaacccgcctcccgc

SEQ ID NO: 9751 - DNA, 20 bp, Artificial
  20-mer unique DNA sequence
gcaaggaagggcgtcggatc

SEQ ID NO: 9752 - DNA, 20 bp, Artificial
  20-mer unique DNA sequence
cagggggatgggtttaggcg

SEQ ID NO: 9753 - DNA, 20 bp, Artificial
  20-mer unique DNA sequence
tattgagcttcggcgcggac

SEQ ID NO: 9754 - DNA, 20 bp, Artificial
  20-mer unique DNA sequence
tgggatcgcaacaaaaccgg

SEQ ID NO: 9755 - DNA, 20 bp, Artificial
  20-mer unique DNA sequence
cgggcggcgcttcaattatg

SEQ ID NO: 9756 - DNA, 20 bp, Artificial
  20-mer unique DNA sequence
tcattacccctcacgtgccg

SEQ ID NO: 9757 - DNA, 20 bp, Artificial
  20-mer unique DNA sequence
tgaagcatcctcccaaccgg

SEQ ID NO: 9758 - DNA, 20 bp, Artificial
  20-mer unique DNA sequence
gtgcccttgcgcttgattga

SEQ ID NO: 9759 - DNA, 20 bp, Artificial
  20-mer unique DNA sequence
tggaccgcacccctctacgc

SEQ ID NO: 9760 - DNA, 20 bp, Artificial
  20-mer unique DNA sequence
tttggttccctggcctctgc

SEQ ID NO: 9761 - DNA, 20 bp, Artificial
  20-mer unique DNA sequence
cgggcgcttctagcttcgat

SEQ ID NO: 9762 - DNA, 20 bp, Artificial
  20-mer unique DNA sequence
ccccaggtccagaaacaggc

SEQ ID NO: 9763 - DNA, 20 bp, Artificial
  20-mer unique DNA sequence
attggctttttggcggctgc

SEQ ID NO: 9764 - DNA, 20 bp, Artificial
  20-mer unique DNA sequence
aacggggaggcggggtatta

SEQ ID NO: 9765 - DNA, 20 bp, Artificial
  20-mer unique DNA sequence
ggtcgtgcttcgtcgtctgg

SEQ ID NO: 9766 - DNA, 20 bp, Artificial
  20-mer unique DNA sequence
tgcgtgcgatggtgctttcc

SEQ ID NO: 9767 - DNA, 20 bp, Artificial
  20-mer unique DNA sequence
atggcggactcttggcgttg

SEQ ID NO: 9768 - DNA, 20 bp, Artificial
  20-mer unique DNA sequence
cctttgagttgtgtgcgccg

SEQ ID NO: 9769 - DNA, 20 bp, Artificial
  20-mer unique DNA sequence
gcttgctcggtcggggctta

SEQ ID NO: 9770 - DNA, 20 bp, Artificial
  20-mer unique DNA sequence
cctgtatcggactgccgtgt

SEQ ID NO: 9771 - DNA, 20 bp, Artificial
  20-mer unique DNA sequence
atgaacgggcccctacagga

SEQ ID NO: 9772 - DNA, 20 bp, Artificial
  20-mer unique DNA sequence
aggaggtgagcgcggattgt

SEQ ID NO: 9773 - DNA, 20 bp, Artificial
  20-mer unique DNA sequence
ccttctcccttggcgcctcg

SEQ ID NO: 9774 - DNA, 20 bp, Artificial
  20-mer unique DNA sequence
gcattctgtccgcactcccg

SEQ ID NO: 9775 - DNA, 20 bp, Artificial
  20-mer unique DNA sequence
tctgcatttggggacgcctt

SEQ ID NO: 9776 - DNA, 20 bp, Artificial
  20-mer unique DNA sequence
cgtcctgtaccccctactgc

SEQ ID NO: 9777 - DNA, 20 bp, Artificial
  20-mer unique DNA sequence
ctgtggtcgtagtcgcggcg

SEQ ID NO: 9778 - DNA, 20 bp, Artificial
  20-mer unique DNA sequence
tcaatgcccttcccaattgc

SEQ ID NO: 9779 - DNA, 20 bp, Artificial
  20-mer unique DNA sequence
tacaaagggcgggaacgggg

SEQ ID NO: 9780 - DNA, 20 bp, Artificial
  20-mer unique DNA sequence
cgtcgttgccgggatctcag

SEQ ID NO: 9781 - DNA, 20 bp, Artificial
  20-mer unique DNA sequence
ccgagcccaagacgtttcca

SEQ ID NO: 9782 - DNA, 20 bp, Artificial
  20-mer unique DNA sequence
gctgctggggtgtggtcgtt

SEQ ID NO: 9783 - DNA, 20 bp, Artificial
  20-mer unique DNA sequence
gggatcagcggggaggaatt

SEQ ID NO: 9784 - DNA, 20 bp, Artificial
  20-mer unique DNA sequence
cgtgaagggcgagtaggcgt

SEQ ID NO: 9785 - DNA, 20 bp, Artificial
  20-mer unique DNA sequence
agcacgcaacagaccgcact

SEQ ID NO: 9786 - DNA, 20 bp, Artificial
  20-mer unique DNA sequence
cggggtggcggctagtatgt

SEQ ID NO: 9787 - DNA, 20 bp, Artificial
  20-mer unique DNA sequence
ataggccaaacacggggggg

SEQ ID NO: 9788 - DNA, 20 bp, Artificial
  20-mer unique DNA sequence
ctcggccacctcaaaccccc

SEQ ID NO: 9789 - DNA, 20 bp, Artificial
  20-mer unique DNA sequence
tgtaggtgcgcgcttcgggt

SEQ ID NO: 9790 - DNA, 20 bp, Artificial
  20-mer unique DNA sequence
ctgcctcgattgcgctgtcc

SEQ ID NO: 9791 - DNA, 20 bp, Artificial
  20-mer unique DNA sequence
aagtacggccccacctcgcc

SEQ ID NO: 9792 - DNA, 20 bp, Artificial
  20-mer unique DNA sequence
gctgcatgcggcactatcgg

SEQ ID NO: 9793 - DNA, 20 bp, Artificial
  20-mer unique DNA sequence
gaacaggccatgacgcgaaa

SEQ ID NO: 9794 - DNA, 20 bp, Artificial
  20-mer unique DNA sequence
ctgatttccgcgtgcttgcc

SEQ ID NO: 9795 - DNA, 20 bp, Artificial
  20-mer unique DNA sequence
tcggcaggaacagcagcact

SEQ ID NO: 9796 - DNA, 20 bp, Artificial
  20-mer unique DNA sequence
cgctcacacgcaaccaaggg

SEQ ID NO: 9797 - DNA, 20 bp, Artificial
  20-mer unique DNA sequence
ccgccgcacccgttatatca

SEQ ID NO: 9798 - DNA, 20 bp, Artificial
  20-mer unique DNA sequence
agcagagcgagtgacggcag

SEQ ID NO: 9799 - DNA, 20 bp, Artificial
  20-mer unique DNA sequence
aattcatcctagggggcggc

SEQ ID NO: 9800 - DNA, 20 bp, Artificial
  20-mer unique DNA sequence
gaccgtagcgcttttgcggg

SEQ ID NO: 9801 - DNA, 20 bp, Artificial
  20-mer unique DNA sequence
cttggctgcatgcggttgga

SEQ ID NO: 9802 - DNA, 20 bp, Artificial
  20-mer unique DNA sequence
agtattggggttggcgcctg

SEQ ID NO: 9803 - DNA, 20 bp, Artificial
  20-mer unique DNA sequence
ccaagcggagcgagggtatc

SEQ ID NO: 9804 - DNA, 20 bp, Artificial
  20-mer unique DNA sequence
gagcggaacaaagggcgtgg

SEQ ID NO: 9805 - DNA, 20 bp, Artificial
  20-mer unique DNA sequence
ttgcggcccttcctcttggt

SEQ ID NO: 9806 - DNA, 20 bp, Artificial
  20-mer unique DNA sequence
agatcaaaccccccgcgaac

SEQ ID NO: 9807 - DNA, 20 bp, Artificial
  20-mer unique DNA sequence
tgaaacgcagctcgccagga

SEQ ID NO: 9808 - DNA, 20 bp, Artificial
  20-mer unique DNA sequence
gagcggcgttgtctgtgtgg

SEQ ID NO: 9809 - DNA, 20 bp, Artificial
  20-mer unique DNA sequence
tagccccttctctcgcctgg

SEQ ID NO: 9810 - DNA, 20 bp, Artificial
  20-mer unique DNA sequence
cctccagctttgccgtcctc

SEQ ID NO: 9811 - DNA, 20 bp, Artificial
  20-mer unique DNA sequence
ggccgcaccgtctcagcttc

SEQ ID NO: 9812 - DNA, 20 bp, Artificial
  20-mer unique DNA sequence
gggtgggcgacaacgagaag

SEQ ID NO: 9813 - DNA, 20 bp, Artificial
  20-mer unique DNA sequence
gacgctttgttgggccctgt

SEQ ID NO: 9814 - DNA, 20 bp, Artificial
  20-mer unique DNA sequence
tcaggtgccctggaccacat

SEQ ID NO: 9815 - DNA, 20 bp, Artificial
  20-mer unique DNA sequence
agcggggaagggacaaggac

SEQ ID NO: 9816 - DNA, 20 bp, Artificial
  20-mer unique DNA sequence
agaccgctcacgtcgaacct

SEQ ID NO: 9817 - DNA, 20 bp, Artificial
  20-mer unique DNA sequence
attaggtccagctgcggtcc

SEQ ID NO: 9818 - DNA, 20 bp, Artificial
  20-mer unique DNA sequence
taggcgcatgcacgaaaagg

SEQ ID NO: 9819 - DNA, 20 bp, Artificial
  20-mer unique DNA sequence
atggcggagcttggtgagga

SEQ ID NO: 9820 - DNA, 20 bp, Artificial
  20-mer unique DNA sequence
tcgaaccgcggatagctgcc

SEQ ID NO: 9821 - DNA, 20 bp, Artificial
  20-mer unique DNA sequence
ggggagctttggggcatgac

SEQ ID NO: 9822 - DNA, 20 bp, Artificial
  20-mer unique DNA sequence
ggctgcggtgggtcgtgtaa

SEQ ID NO: 9823 - DNA, 20 bp, Artificial
  20-mer unique DNA sequence
gcccgacccgctttgtactc

SEQ ID NO: 9824 - DNA, 20 bp, Artificial
  20-mer unique DNA sequence
cccggttgcttgatcgcttg

SEQ ID NO: 9825 - DNA, 20 bp, Artificial
  20-mer unique DNA sequence
cgggggccagaggggtagag

SEQ ID NO: 9826 - DNA, 20 bp, Artificial
  20-mer unique DNA sequence
ggcacgcaaccaaccagacg

SEQ ID NO: 9827 - DNA, 20 bp, Artificial
  20-mer unique DNA sequence
tcaaaagcggcggacagagg

SEQ ID NO: 9828 - DNA, 20 bp, Artificial
  20-mer unique DNA sequence
gggccgggacgaaaggtgtt

SEQ ID NO: 9829 - DNA, 20 bp, Artificial
  20-mer unique DNA sequence
aacagctattggggtggcgg

SEQ ID NO: 9830 - DNA, 20 bp, Artificial
  20-mer unique DNA sequence
ccttgtgggaccgcggattt

SEQ ID NO: 9831 - DNA, 20 bp, Artificial
  20-mer unique DNA sequence
cgcgaacgggacaactctga

SEQ ID NO: 9832 - DNA, 20 bp, Artificial
  20-mer unique DNA sequence
caggacaggccaagcaccga

SEQ ID NO: 9833 - DNA, 20 bp, Artificial
  20-mer unique DNA sequence
caaggagagacgccccaacg

SEQ ID NO: 9834 - DNA, 20 bp, Artificial
  20-mer unique DNA sequence
tgtccggaagctcgtagggc

SEQ ID NO: 9835 - DNA, 20 bp, Artificial
  20-mer unique DNA sequence
atgccggttctctcgtcccc

SEQ ID NO: 9836 - DNA, 20 bp, Artificial
  20-mer unique DNA sequence
cgcgctaacggtagcccttt

SEQ ID NO: 9837 - DNA, 20 bp, Artificial
  20-mer unique DNA sequence
gctgctccgcgttaagatcg

SEQ ID NO: 9838 - DNA, 20 bp, Artificial
  20-mer unique DNA sequence
caggggcaaagtgggcaagg

SEQ ID NO: 9839 - DNA, 20 bp, Artificial
  20-mer unique DNA sequence
tgcgagggaagttaagccgg

SEQ ID NO: 9840 - DNA, 20 bp, Artificial
  20-mer unique DNA sequence
acacccgtggacctcacttg

SEQ ID NO: 9841 - DNA, 20 bp, Artificial
  20-mer unique DNA sequence
atagcgggactccggtggta

SEQ ID NO: 9842 - DNA, 20 bp, Artificial
  20-mer unique DNA sequence
acggggagcggaacctatca

SEQ ID NO: 9843 - DNA, 20 bp, Artificial
  20-mer unique DNA sequence
atccaggggcgcaatccaat

SEQ ID NO: 9844 - DNA, 20 bp, Artificial
  20-mer unique DNA sequence
tatctttgggctggcgaggg

SEQ ID NO: 9845 - DNA, 20 bp, Artificial
  20-mer unique DNA sequence
ggggtggcagtgttggcgtc

SEQ ID NO: 9846 - DNA, 20 bp, Artificial
  20-mer unique DNA sequence
agtctgccaggctacaccga

SEQ ID NO: 9847 - DNA, 20 bp, Artificial
  20-mer unique DNA sequence
tagggtccagcctgtgggaa

SEQ ID NO: 9848 - DNA, 20 bp, Artificial
  20-mer unique DNA sequence
tctatgtggtgccagagccg

SEQ ID NO: 9849 - DNA, 20 bp, Artificial
  20-mer unique DNA sequence
tcacacgtcatagcgggtgg

SEQ ID NO: 9850 - DNA, 20 bp, Artificial
  20-mer unique DNA sequence
tctcgctcgcactacgacac

SEQ ID NO: 9851 - DNA, 20 bp, Artificial
  20-mer unique DNA sequence
acggtcgcggtcaccagaat

SEQ ID NO: 9852 - DNA, 20 bp, Artificial
  20-mer unique DNA sequence
tgctgtacgcagaaggtcgc

SEQ ID NO: 9853 - DNA, 20 bp, Artificial
  20-mer unique DNA sequence
atcggtgttaggcactcgcc

SEQ ID NO: 9854 - DNA, 20 bp, Artificial
  20-mer unique DNA sequence
atcagccgctcggtggtaac

SEQ ID NO: 9855 - DNA, 20 bp, Artificial
  20-mer unique DNA sequence
cgaagctggcgcgataatgc

SEQ ID NO: 9856 - DNA, 20 bp, Artificial
  20-mer unique DNA sequence
cgtttggtatgaggcgccga

SEQ ID NO: 9857 - DNA, 20 bp, Artificial
  20-mer unique DNA sequence
gcggaaggcggtcaaagaga

SEQ ID NO: 9858 - DNA, 20 bp, Artificial
  20-mer unique DNA sequence
cacatgacggaccgcatcca

SEQ ID NO: 9859 - DNA, 20 bp, Artificial
  20-mer unique DNA sequence
gttatgcagccgctcgccaa

SEQ ID NO: 9860 - DNA, 20 bp, Artificial
  20-mer unique DNA sequence
ttgccactggtcagcagagt

SEQ ID NO: 9861 - DNA, 20 bp, Artificial
  20-mer unique DNA sequence
actggtgtacgtccgaggga

SEQ ID NO: 9862 - DNA, 20 bp, Artificial
  20-mer unique DNA sequence
cgttgtcgttccgacccact

SEQ ID NO: 9863 - DNA, 20 bp, Artificial
  20-mer unique DNA sequence
caccacgcggacgctcaaat

SEQ ID NO: 9864 - DNA, 20 bp, Artificial
  20-mer unique DNA sequence
ctcaggcaaggactcgccaa

SEQ ID NO: 9865 - DNA, 20 bp, Artificial
  20-mer unique DNA sequence
tgtggctctgtccagacgtg

SEQ ID NO: 9866 - DNA, 20 bp, Artificial
  20-mer unique DNA sequence
ttgggtctccaggtccctca

SEQ ID NO: 9867 - DNA, 20 bp, Artificial
  20-mer unique DNA sequence
aaatcccgcgagctactggc

SEQ ID NO: 9868 - DNA, 20 bp, Artificial
  20-mer unique DNA sequence
gaccgggccgtgtaacatca

SEQ ID NO: 9869 - DNA, 20 bp, Artificial
  20-mer unique DNA sequence
ctgcgtgtacgtctcgggaa

SEQ ID NO: 9870 - DNA, 20 bp, Artificial
  20-mer unique DNA sequence
ttacggactggccgctcaac

SEQ ID NO: 9871 - DNA, 20 bp, Artificial
  20-mer unique DNA sequence
caagcccctgagcagaccaa

SEQ ID NO: 9872 - DNA, 20 bp, Artificial
  20-mer unique DNA sequence
gttcgcgcacagttacggca

SEQ ID NO: 9873 - DNA, 20 bp, Artificial
  20-mer unique DNA sequence
cctagcgacggtgcccatta

SEQ ID NO: 9874 - DNA, 20 bp, Artificial
  20-mer unique DNA sequence
ttaggctcacacctggctgg

SEQ ID NO: 9875 - DNA, 20 bp, Artificial
  20-mer unique DNA sequence
agatagctccgagcggccat

SEQ ID NO: 9876 - DNA, 20 bp, Artificial
  20-mer unique DNA sequence
gctcccagcttatacggcct

SEQ ID NO: 9877 - DNA, 20 bp, Artificial
  20-mer unique DNA sequence
tcacgcgtgtcgctagttgc

SEQ ID NO: 9878 - DNA, 20 bp, Artificial
  20-mer unique DNA sequence
ctgacgcgacctatgaccga

SEQ ID NO: 9879 - DNA, 20 bp, Artificial
  20-mer unique DNA sequence
ctgttgcggcacgtccatgt

SEQ ID NO: 9880 - DNA, 20 bp, Artificial
  20-mer unique DNA sequence
acgcccagggcctacactat

SEQ ID NO: 9881 - DNA, 20 bp, Artificial
  20-mer unique DNA sequence
tgtacgcggacttgagtggc

SEQ ID NO: 9882 - DNA, 20 bp, Artificial
  20-mer unique DNA sequence
gatgccctagtgcgtccaga

SEQ ID NO: 9883 - DNA, 20 bp, Artificial
  20-mer unique DNA sequence
tcggttcgccactaggcttc

SEQ ID NO: 9884 - DNA, 20 bp, Artificial
  20-mer unique DNA sequence
atacggtggtaccgtgcctg

SEQ ID NO: 9885 - DNA, 20 bp, Artificial
  20-mer unique DNA sequence
atcaccggcagtgtgggatg

SEQ ID NO: 9886 - DNA, 20 bp, Artificial
  20-mer unique DNA sequence
agacgaatcgctcggcaggt

SEQ ID NO: 9887 - DNA, 20 bp, Artificial
  20-mer unique DNA sequence
ttctgcacgtctcggacgac

SEQ ID NO: 9888 - DNA, 20 bp, Artificial
  20-mer unique DNA sequence
agcccatgggacctacctca

SEQ ID NO: 9889 - DNA, 20 bp, Artificial
  20-mer unique DNA sequence
atgtgggccaggttagtcgc

SEQ ID NO: 9890 - DNA, 20 bp, Artificial
  20-mer unique DNA sequence
tgtcttgtcgtaggtgcccg

SEQ ID NO: 9891 - DNA, 20 bp, Artificial
  20-mer unique DNA sequence
atgacgtcacggaactggca

SEQ ID NO: 9892 - DNA, 20 bp, Artificial
  20-mer unique DNA sequence
tttcaggaccgacacggctc

SEQ ID NO: 9893 - DNA, 20 bp, Artificial
  20-mer unique DNA sequence
gttctgcacgtgctaggggt

SEQ ID NO: 9894 - DNA, 20 bp, Artificial
  20-mer unique DNA sequence
aaatcccaggtgcagcgtga

SEQ ID NO: 9895 - DNA, 20 bp, Artificial
  20-mer unique DNA sequence
aaggcgcatgacggtcccta

SEQ ID NO: 9896 - DNA, 20 bp, Artificial
  20-mer unique DNA sequence
atgtgcactcgcaaccgcct

SEQ ID NO: 9897 - DNA, 20 bp, Artificial
  20-mer unique DNA sequence
gttcccggggctcgaatact

SEQ ID NO: 9898 - DNA, 20 bp, Artificial
  20-mer unique DNA sequence
acgcctagcgcttactccac

SEQ ID NO: 9899 - DNA, 20 bp, Artificial
  20-mer unique DNA sequence
atggtgcccgagggagcatt

SEQ ID NO: 9900 - DNA, 20 bp, Artificial
  20-mer unique DNA sequence
ggtcgagaggcgctaagtga

SEQ ID NO: 9901 - DNA, 20 bp, Artificial
  20-mer unique DNA sequence
taccacccgtgacggtctct

SEQ ID NO: 9902 - DNA, 20 bp, Artificial
  20-mer unique DNA sequence
ggcagcgtacgacgtctcaa

SEQ ID NO: 9903 - DNA, 20 bp, Artificial
  20-mer unique DNA sequence
aaggagagtgcccggagtgt

SEQ ID NO: 9904 - DNA, 20 bp, Artificial
  20-mer unique DNA sequence
tgctcgatccggtaggcaga

SEQ ID NO: 9905 - DNA, 20 bp, Artificial
  20-mer unique DNA sequence
aacgtctgccgacaggagca

SEQ ID NO: 9906 - DNA, 20 bp, Artificial
  20-mer unique DNA sequence
ttcgtaccgaccgggcaatc

SEQ ID NO: 9907 - DNA, 20 bp, Artificial
  20-mer unique DNA sequence
aggcggttcatgtcagggtg

SEQ ID NO: 9908 - DNA, 20 bp, Artificial
  20-mer unique DNA sequence
agcgcttacgcgtcaggaaa

SEQ ID NO: 9909 - DNA, 20 bp, Artificial
  20-mer unique DNA sequence
gcggtgcacataggacaacc

SEQ ID NO: 9910 - DNA, 20 bp, Artificial
  20-mer unique DNA sequence
acgtcgagtaacccgtgcat

SEQ ID NO: 9911 - DNA, 20 bp, Artificial
  20-mer unique DNA sequence
aacagtctggcctgtggcga

SEQ ID NO: 9912 - DNA, 20 bp, Artificial
  20-mer unique DNA sequence
ttgtcggtacgcactctggg

SEQ ID NO: 9913 - DNA, 20 bp, Artificial
  20-mer unique DNA sequence
catcccacggtcggagacat

SEQ ID NO: 9914 - DNA, 20 bp, Artificial
  20-mer unique DNA sequence
cgccagactaggtgtgagca

SEQ ID NO: 9915 - DNA, 20 bp, Artificial
  20-mer unique DNA sequence
aggataccgccgaatgcacg

SEQ ID NO: 9916 - DNA, 20 bp, Artificial
  20-mer unique DNA sequence
tgagggtcctaacctgcgga

SEQ ID NO: 9917 - DNA, 20 bp, Artificial
  20-mer unique DNA sequence
tatgaccgcagtcgccgtga

SEQ ID NO: 9918 - DNA, 20 bp, Artificial
  20-mer unique DNA sequence
tcgtgccacgctagaacctt

SEQ ID NO: 9919 - DNA, 20 bp, Artificial
  20-mer unique DNA sequence
cgacctcgcaggttacgaca

SEQ ID NO: 9920 - DNA, 20 bp, Artificial
  20-mer unique DNA sequence
ataccgtgtcgctcggatgc

SEQ ID NO: 9921 - DNA, 20 bp, Artificial
  20-mer unique DNA sequence
gggactgcccgttgctagtt

SEQ ID NO: 9922 - DNA, 20 bp, Artificial
  20-mer unique DNA sequence
cttggactgcggttccgcta

SEQ ID NO: 9923 - DNA, 20 bp, Artificial
  20-mer unique DNA sequence
tgcacctgggtctcgcgtta

SEQ ID NO: 9924 - DNA, 20 bp, Artificial
  20-mer unique DNA sequence
tttgggacacctgggctctc

SEQ ID NO: 9925 - DNA, 20 bp, Artificial
  20-mer unique DNA sequence
accgcctgcacgtatggcta

SEQ ID NO: 9926 - DNA, 20 bp, Artificial
  20-mer unique DNA sequence
ttgcacctacgtgactgcct

SEQ ID NO: 9927 - DNA, 20 bp, Artificial
  20-mer unique DNA sequence
cgttagtccaggctcgcagt

SEQ ID NO: 9928 - DNA, 20 bp, Artificial
  20-mer unique DNA sequence
gactgtgcgcactgcggtta

SEQ ID NO: 9929 - DNA, 20 bp, Artificial
  20-mer unique DNA sequence
tgccggcgacctaacatgag

SEQ ID NO: 9930 - DNA, 20 bp, Artificial
  20-mer unique DNA sequence
ggatatgcgatcggcccaga

SEQ ID NO: 9931 - DNA, 20 bp, Artificial
  20-mer unique DNA sequence
cctaaaccgggttcgccagt

SEQ ID NO: 9932 - DNA, 20 bp, Artificial
  20-mer unique DNA sequence
agacgcgtaacggcggtctt

SEQ ID NO: 9933 - DNA, 20 bp, Artificial
  20-mer unique DNA sequence
gcctcactacgcgtcagtct

SEQ ID NO: 9934 - DNA, 20 bp, Artificial
  20-mer unique DNA sequence
aagagtccgtgccaacgtct

SEQ ID NO: 9935 - DNA, 20 bp, Artificial
  20-mer unique DNA sequence
tgtaagtcgcgaccggtacg

SEQ ID NO: 9936 - DNA, 20 bp, Artificial
  20-mer unique DNA sequence
ggacatgacacgcggaccta

SEQ ID NO: 9937 - DNA, 20 bp, Artificial
  20-mer unique DNA sequence
ccgttccggtctaagggcaa

SEQ ID NO: 9938 - DNA, 20 bp, Artificial
  20-mer unique DNA sequence
aacgagttcgcgctagacca

SEQ ID NO: 9939 - DNA, 20 bp, Artificial
  20-mer unique DNA sequence
tcttgacgtggacccagtgc

SEQ ID NO: 9940 - DNA, 20 bp, Artificial
  20-mer unique DNA sequence
ttgcacgtgagtcggcctat

SEQ ID NO: 9941 - DNA, 20 bp, Artificial
  20-mer unique DNA sequence
atcacccggtgggctgtatc

SEQ ID NO: 9942 - DNA, 20 bp, Artificial
  20-mer unique DNA sequence
accagtagacgggcacatcg

SEQ ID NO: 9943 - DNA, 20 bp, Artificial
  20-mer unique DNA sequence
atcgtagcgtgcccaaaggt

SEQ ID NO: 9944 - DNA, 20 bp, Artificial
  20-mer unique DNA sequence
gctggtccctgagcgtatca

SEQ ID NO: 9945 - DNA, 20 bp, Artificial
  20-mer unique DNA sequence
cgccctacttgcgtcgagtt

SEQ ID NO: 9946 - DNA, 20 bp, Artificial
  20-mer unique DNA sequence
cccagattagccgacacgct

SEQ ID NO: 9947 - DNA, 20 bp, Artificial
  20-mer unique DNA sequence
gaaggccacctgtgacagca

SEQ ID NO: 9948 - DNA, 20 bp, Artificial
  20-mer unique DNA sequence
ttttgcccggacagctctgg

SEQ ID NO: 9949 - DNA, 20 bp, Artificial
  20-mer unique DNA sequence
ccggcgcttagaggtggtat

SEQ ID NO: 9950 - DNA, 20 bp, Artificial
  20-mer unique DNA sequence
tgtaagtatgcgggccggtt

SEQ ID NO: 9951 - DNA, 20 bp, Artificial
  20-mer unique DNA sequence
ccgtgtcagtccggttcaga

SEQ ID NO: 9952 - DNA, 20 bp, Artificial
  20-mer unique DNA sequence
tgacgacgcagtagggaacc

SEQ ID NO: 9953 - DNA, 20 bp, Artificial
  20-mer unique DNA sequence
actctcagggcacagtgacg

SEQ ID NO: 9954 - DNA, 20 bp, Artificial
  20-mer unique DNA sequence
tggcgtcgacacggaggttt

SEQ ID NO: 9955 - DNA, 20 bp, Artificial
  20-mer unique DNA sequence
tgcccagtctagccctgaca

SEQ ID NO: 9956 - DNA, 20 bp, Artificial
  20-mer unique DNA sequence
atcgtcagaccggcagtgga

SEQ ID NO: 9957 - DNA, 20 bp, Artificial
  20-mer unique DNA sequence
gcagtccacactgcgtccaa

SEQ ID NO: 9958 - DNA, 20 bp, Artificial
  20-mer unique DNA sequence
ggcgttctcacacggactct

SEQ ID NO: 9959 - DNA, 20 bp, Artificial
  20-mer unique DNA sequence
agcgccgcggcttatagtag

SEQ ID NO: 9960 - DNA, 20 bp, Artificial
  20-mer unique DNA sequence
ccgtggcactccgtgagatt

SEQ ID NO: 9961 - DNA, 20 bp, Artificial
  20-mer unique DNA sequence
tcactccggtagggtagcca

SEQ ID NO: 9962 - DNA, 20 bp, Artificial
  20-mer unique DNA sequence
tgctccccgagcgtgcataa

SEQ ID NO: 9963 - DNA, 20 bp, Artificial
  20-mer unique DNA sequence
cgccgtcaatcgtgggactt

SEQ ID NO: 9964 - DNA, 20 bp, Artificial
  20-mer unique DNA sequence
tctctaacgtgcacgaggcg

SEQ ID NO: 9965 - DNA, 20 bp, Artificial
  20-mer unique DNA sequence
gtgtggcactacctagccgt

SEQ ID NO: 9966 - DNA, 20 bp, Artificial
  20-mer unique DNA sequence
tcctctgggactacgcgcaa

SEQ ID NO: 9967 - DNA, 20 bp, Artificial
  20-mer unique DNA sequence
tgggccagacagctaggctt

SEQ ID NO: 9968 - DNA, 20 bp, Artificial
  20-mer unique DNA sequence
tgcgtctgatccgggactgt

SEQ ID NO: 9969 - DNA, 20 bp, Artificial
  20-mer unique DNA sequence
caaaggagtcgcgtcggaca

SEQ ID NO: 9970 - DNA, 20 bp, Artificial
  20-mer unique DNA sequence
ccactagccgtgcgcatact

SEQ ID NO: 9971 - DNA, 20 bp, Artificial
  20-mer unique DNA sequence
gggtcggcactacgttctca

SEQ ID NO: 9972 - DNA, 20 bp, Artificial
  20-mer unique DNA sequence
ttccagtccgctcgtacagc

SEQ ID NO: 9973 - DNA, 20 bp, Artificial
  20-mer unique DNA sequence
ttgcacggccattgtgctcg

SEQ ID NO: 9974 - DNA, 20 bp, Artificial
  20-mer unique DNA sequence
tggtcatacccggagacgca

SEQ ID NO: 9975 - DNA, 20 bp, Artificial
  20-mer unique DNA sequence
gggaggttgcactctggtca

SEQ ID NO: 9976 - DNA, 20 bp, Artificial
  20-mer unique DNA sequence
atgggcgcgcgcagattact

SEQ ID NO: 9977 - DNA, 20 bp, Artificial
  20-mer unique DNA sequence
agggtgcagtcctggctaga

SEQ ID NO: 9978 - DNA, 20 bp, Artificial
  20-mer unique DNA sequence
tgtgccgtgagtgcccagaa

SEQ ID NO: 9979 - DNA, 20 bp, Artificial
  20-mer unique DNA sequence
atgacatgcggtacgcggca

SEQ ID NO: 9980 - DNA, 20 bp, Artificial
  20-mer unique DNA sequence
tagtcggccttatgggcacg

SEQ ID NO: 9981 - DNA, 20 bp, Artificial
  20-mer unique DNA sequence
gtgacgaactcgcggaacga

SEQ ID NO: 9982 - DNA, 20 bp, Artificial
  20-mer unique DNA sequence
gttcacgtcggaactgccca

SEQ ID NO: 9983 - DNA, 20 bp, Artificial
  20-mer unique DNA sequence
tttcggatcccggagtgtcg

SEQ ID NO: 9984 - DNA, 20 bp, Artificial
  20-mer unique DNA sequence
agggagttcgagggcccaaa

SEQ ID NO: 9985 - DNA, 20 bp, Artificial
  20-mer unique DNA sequence
tttcgtagcgtgacgagggc

SEQ ID NO: 9986 - DNA, 20 bp, Artificial
  20-mer unique DNA sequence
atcgcgccagggtgtagaac

SEQ ID NO: 9987 - DNA, 20 bp, Artificial
  20-mer unique DNA sequence
gcgcagtcgtagacggcaat

SEQ ID NO: 9988 - DNA, 20 bp, Artificial
  20-mer unique DNA sequence
caagtgcagtgggactgcct

SEQ ID NO: 9989 - DNA, 20 bp, Artificial
  20-mer unique DNA sequence
ggggttagccgtcggaatga

SEQ ID NO: 9990 - DNA, 20 bp, Artificial
  20-mer unique DNA sequence
gggtatcgtcaccggtcgaa

SEQ ID NO: 9991 - DNA, 20 bp, Artificial
  20-mer unique DNA sequence
gatcgatccaggcaccgtga

SEQ ID NO: 9992 - DNA, 20 bp, Artificial
  20-mer unique DNA sequence
gcgctctagtcggctcgtat

SEQ ID NO: 9993 - DNA, 20 bp, Artificial
  20-mer unique DNA sequence
tcccgtaacgtggcagcact
